United States Patent Application Publication US 2016/0017349 A1 - sequence listing, part 2

SEQ ID NO: 2293 - DNA, 3386 bp, Zea mays
ccgcgaccccaggtcagtcgggactacccgctgagtttaagcatataaataagcggaggagaagaaacttacgaggattcccctagtaacggcgagcgaaccgggagcagcccagcttgagaatcgggcggcctcgccgcccgaattgtagtctggagaggcgtcctcagcgacggaccgggcccaagttctctggaaagggacgcctgggagggtgagagccccgtccggcccggaccctgtcgcaccacgaggcgccgtcaacgagtcgggttgtttgggaatgcagcccaaatcgggcggtaaactccgtccaaggctaaatacaggcgagagaccgatagcgaacaagtaccgcgagggaaagatgaaaaggactttgaaaagagagtcaaagagtgcttgaaattgccgggagggaagcggatgggggctggcgacgcgcaccggccgtatgcggaacggctcctgctggtccgccgatcggctcggggcgtggaccgttgtcgcccgcgccggcggccaaagcccgggggccctaggcgcccccggcagccgtcgtcggcgcggacggtatccgcgcgcctctggcgcgcccctcggggcgctgcgccgcaacggcctgcgagctccccatccgacccgtcttgaaacacggaccaaggagtctgacatgcgtgcgagtcgacgggttcagaaacctgagatgcgcaaggaagctgacgagcgggaggccctcacgggccgcaccgctggccgaccctgatcttctgtgaagggttcgagttggagcacgcctgtcgggacccgaaagatggtgaactatgcctgagcggggcgaagccagaggaaactctggtggaggctcgaagcgatactgacgtgcaaatcgttcgtctgacttgggtataggggcgaaagactaatcgaaccatctagtagctggttccctccgaagtttccctcaggatagctggagcccacacgagttctatcgggtaaagccaatgattagaggcatcgggggcgcaacgccctcgacctattctcaaactttaaataggtaggacggcgcggctgcttcggtgagccgtgccacggaatcgggagctccaagtgggccatttttggtaagcagaactggcgatgcgggatgaaccggaagccgggttacggtgccaaactgcgcgctaacctagaacccacaaagggtgttggtcgattaagacagcaggacggtggtcatggaagtcgaaatccgctaaggagtgtgtaacaactcacctgccgaatcaactagccccgaaaatggatggcgctgaagcgcgcgacccacacccggccatctgggcgagcgacatgccccgatgagtaggagggcgcggcggccgccgcaaaacccggggcgcgagcccgggcggagcggccgtcggtgcagatcttggtggtagtagcaaatattcaaatgagaactttgaaggccgaagaggagaaaggttccatgtgaacggcacttgcacatgggtaagccgatcctaagggacgggggaaacccggcagatagcgcgatcacgcgcgtcacccgaaagggaatcgggttaagatttcccgagccgggacgtggcggcagacggcgacgttaggaagtccggagacgccggcgggggcctcgggaagagttatcttttctgcttaacggcccgccaaccctggaatcggttcagccggaggtagggtccagcggccggaagagcaccgcacatcgcgcggtgtccggtgcgcccccggcggcccttgaaaatccggaggaccgaattccgtccacgcccggtcgtactcataaccgcatcaggtctccaaggtgaacagcctctggccaatggaacaatgtaggcaagggaagtcggcaaaacggatccgtaacttcgggaaaaggattggctctgagggttgggctcgggggtcccggccccgaacccgtcggctgctggcggaatgctcgagctgctcgcgcggcgagagcgggccgccgcgtgccggccgggggacggaccgggaacggccccctcgggggccttccccgggcgtcgaacaaccgactcagaactggtacggacaaggggaatccgactgtttaattaaaacaaagcattgcgacggtcctcgaggatgctgacgcaatgtgatttctgcccagtgctctgaatgtcaaagtgaagaaattcaaccaagcgcgggtaaacggcgggagtaactatgactctcttaaggtagccaaatgcctcgtcatctaattagtgacgcgcatgaatggattaacgagattcccactgtccctgtctactatccagcgaaaccacagccaagggaacgggcttggcggaatcagcggggaaagaagaccctgttgagcttgactctagtccgactttgtgaaatgacttgagaggtgtaggataagtgggagcctccgggcgcaagtgaaataccactacttttaacgttattttacttattccgtgggtcggaagcggggcaccgcccctccttttggctccaaggcccggcctcgccgggccgatccgggcggaagacattgttaggtggggagtttggctggggcggcacatctgttaaaagataacgcaggtgtcctaagatgagctcaacgagaacagaaatctcgtgtggaacaaaagggtaaaagctcgtttgattctgatttccagtacgaatacgaaccgtgaaagcgtggcctatcgatcctttagaccttcggagtttgaagctagaggtgtcagaaaagttaccacagggataactggcttgtggcagccaagcgttcatagcgacgttgctttttgatccttcgatgtcggctcttcctatcattgtgaagcagaattcaccaagtgttggattgttcacccaccaatagggaacgtgagctgggtttagaccgtcgtgagacaggttagttttaccctactgatgaccgcgccgcgatagtaattcaacctagtacgagaggaaccgttgattcacacaattggtcatcgcgcttggttgaaaagccagtggcgcgaagctaccgtgtgccggattatgactgaacgcctctaagtcagaatccaagctagcaaccggcgcctctgctcgccgcccgccccgacccacgttagggcgttcgcgccccaagggcccgtgccattggctcagcccgcccggccgacgcgccgcggcgggccgcctcgaagctcccttcccaacgggcggcgtgctgaatcctttgcagacgacttaaaacgcgacggggcattgtaagtggcagagtggccttgctgccacgatccactgagatccagccccgcgtcgcacggattcgt

SEQ ID NO: 2294 - DNA, 1113 bp, Zea mays
gcgtcccttgcgcccgaaagcctcagggccactccagctacagcctgtcttgacccgtgtcgaacgctcctctcgccactcaaagtatcgtgctagagctctgctcactatatagagcggccactgctatgttcgtgatgaatcgctacgagcacagctagctagctacgacgtcgatccagaactgcacgccagtctagctagtgggccaggcttcgtcctcgaccagaatttaaccgggcgggtgctgctagctggtccgatccgttggagagagacgatggcggagcccagacgcacgcggccgtcgacgttccggtgcgccgcggcgacggtgctggcgctgctggtggtcgtcgtcgtcatcgtcctcctgtggctcttcctccacccgtccaagctctacttctccgtcgaccacgccggcacgacgggcttcaacttcacggccgccggcgggctcgcgggcgccttcgacctcaccctgcgcgcctccaacccgaacgagcgcgcgagcgtgtcgtaccgctgggtcgacgtcggggtctggtacaacggcacgtacctcgcgggcgcccacgcgccgggcttcttccagcggcccggggacgagacccggctggacgtggtcgcgcgggcggcgccggacgcctgggtgctgccgcggggcgtggaggagggcatgaagaaggagcgcacggccggcaagctggcggtggacgtgcacgtcgtcgccaaggtgcggttccgctacggcgtggtgcggacgcgcaagtacaccgttcgcgccagctgccccgcggtccccgccgagtttgtgccgccgacctcgttcgaccgggtgaactgccacgtgcacatatgagttttacgaaaccctgcgtgagatggtccaagggattaagctctgggtggattgattggttggttggttggttttatcgatgccttcttttcgtgctatcttggtttgcttgttgtctgcatgcttatttaatttcttcgcttaattactctattgttttattttatgcaaactgattttcatggattggcgatgtaattatctgtaagaaaatttaatttgaaccaacgtacggaggttgcatgaga

SEQ ID NO: 2295 - DNA, 567 bp, Zea mays
atggaggactacgtagcgccggagatcatcgccgggcgcggccacgacttcacggtggactggtggggcctgggcgtggtgctatacgagatgctctacggccgcacgccgttccgggggcagagccgcagggagaccttctaccgtgtcctcaccaagcagccggagctcgtcggcgagcagacgccgctgcgcgacctcatcgcccgcctcctcgagaaggaccccgagaagcgcatcggcgcgcgcggcgtcaaggcgcaccctttcttctgcggcgtcgactgggaccgcatcctgcaggtggcgcgcccgccgttcatcccgacgccgccgccgcaggacgagggcgaggacggcgacgaggcgcttgacgtcgagaaggtcgtctgcgaggtgttcgcgtccaacgatgcggagggcgggaaggcttggcctgtggcggacggaggccgtgtcggcggcggcgacggcgacggaatggagaccgggtcgctcggcgacggcgatgccgtcagttttgggatcgaaatgccagaaaaaagagatttacgtggagagctttga

SEQ ID NO: 2296 - DNA, 2837 bp, Zea mays
gaatgctatacagagagaggctgcgttgcctcgtatccaatctaacggcggataacaccgagtggcgaccgcctgacgcgcccgtgtcggcaagccgccgacgacttgacgtggggcgggggaaacaaaacaacgcgggcagcgctacggcaagcgcgtccctgccacggcgcggacacagagagtggaaaccggaaggggggaagagagatggattcctccacctcggcggcggcggcaggggaggcggccgtgccgccggaggacgacgtctgctccgtctgccacgaccgcttccggatcccgtgtcaggcgaactgctcccattggttctgtggagagtgcatcatccgcgtttggaattatggacctcctgtacaggcttgcaagtgtcccatttgtcgccgccttataaatctactggtgcctgctgcattatcagggcaggaggatggtccacaagctcaacgtattctaggagagattcagcactataactgtatatttggtggagcaccacgcagcctaactcagaggttgcaagacctacccttcttcatccgaagactgttcagagaactaatggacccccagcggaccctcccactcgtgttcagggcgcggatgctgatgatggtcgcactgagtgcaatttatgtgctgagccctgtcgacattcttcccgaaagcatgctgggcctctttggattcgtcgatgacctgctcatcctgctgatcgtgttcctccacctcgccgcggtgtaccggtcgttgctcctgtaccgccacgggggccagtagaagtcgctgtgcataaaccgtttgtttagctggtttccatgtggagttctctgagatcgcagcagcggatttggaagatcgccgactcgccgagtagatggcaacgtcacggacggcttagcctgtccctgctctgtaccattctactacgcctgtttttctgagactctgacacggtgaactgaactttggttggttgatgcaagtgaatttcccttcgttttactcgtcaggaaaagaaagggaaagagtttgcgttcgtttgtctttgtttctgctctttggaagttggaattgaaactgcactgatgtttgcgtttcaggaactgcattgacgtggatcctgctcagttctcttagcatttacttatgggccaagtttgtagaagtttagtgggctgtagacccattggtgtcatgttgggccaccgcgacgagtaaagaagaggtaggggatcgccctggccgggtagttggctcttgcgggagggatgagatgggaatgggatggcgacgggcgggcgtgtgcggctgcaagcggctcggaaggggcacggtggagacgcagcggaccctcgcctcttctcctgctcctgctgctgacctgacgagctgagcccacggacgagaggggagacgaggaggggcacaccacgcaggagaccggaggagagcgcgcgcgcggatccacctcgtatacacttcctcttcttctccgtgtccttggctcagatttagttgctgcgccgcttcttaggattgattgctgcttcacccggtgatcgcgtcgtcatcttcgcgtttgcttaatcgcctggttgctgcatcggttttttttttttgtgtgtgtgttgtgtggttgggggtgcgggcacagggtttcctcctgcttagcctggattggtgtaggatttcgatgtgatcgatggcggccgaagacaaaattttaggtttcgttcggttcactgcgcgtcttgctgtcctctctgctaggaatcacaaattttagtctcccctgctctgattgataccagctttctggtgctgtgcaggatgttggcaagaccatcagcaccgcctttggtgactgctcaaactcctgaagtcggcatcttcattacagctcgcaacgtctcgggtgcactggtcgccaagcttcctggtaacaaaaacaagtgtggaggaagatcgaatgtccggcagcggaacatccaacctgggaaaaggggctgtcgtcgggagtggcgggcgctctcagcagctgaccaagcgcaggcttctaccttggacgtagatgaggagtgcaaacgggtgctcactccattgggtttctccagcgaagacgccgagaagatgctgaagaaagcgtttggctggacccactcgccgtactggagcgaggagagggagaaggaggttccgaccgccgaggcggtagctggagtgctggactacatcaggagcctggggctgtcggacgaagaccttggcaggctgctgaagaagttccccgaggttcttgggtgcgacctcgacggcgaggtgaggccgaatgtgggcaagctggacagtgactggggaataaacgggaagaccctgcggagccttctgctgaggaaccccaaggttctgggctacaatgttgactgcagaggggattgcatggcccagtgcacccgctgttgggttaggttctgatgatgattggttttgttcttcgtcgccacatcgttggtcaggaacttgggacttggttttgcttgctggccatttttctgtaagctagcacctgtcgaatgtagcacaatcgctagctgctggatattgggttggccactgttagttcttatgtacgtacaacagattcaagagctaaaccatgctgctgttgtctgtaaaagagttgcaataaatatggccagaattcctgaatggcctgtggtaccgcagtgacttgctattgttcttctgctctggatttccacattgtcttgttgtgatgtgaggtcctgtccttgtgctttgatgcatctccc

SEQ ID NO: 2297 - DNA, 2747 bp, Zea mays
caaccgcgtcgtcggcgtgcgcgatcccgagaggcccagccatcagcttccttggcggggtgtgtatgcgcgtacgtcggccgtgaccagatcggctgagccaaggccatggcggaaccggccctcctcccgccggaccccttcgcggacctccccttccccgaatttcaggcgcccatcgacggcgacagcttcgcgcttgaggacttcgatctggaggatctggacctggacgtggacttcgacctcgacctcttcggctcggacgggcaaccctcgcaaccgcccccgctcgcgacctcgtcctcctcggccgggtctccggttggaggctcgtcctcttccggtgccgtcggggacggcggagggctgaggaatgaggagtcttcggagtcgtcttcgaggagcgcgagcggcacggatggcagcggcaaggggaagggggaggaggacgaagcgaagcggcgcgcgcggcaggtacgcaaccgcgagagcgcgcacctgtcgcggcagaggaagaagcagtacgtggaggagttagagggtaaggtgaaggccatgcaggccaccatcgccgacctctccgccaggatctcctgcgtcaccgccgagaacgccgctctcaaacagcagctgggtggcgctgctggggccgcgccgccgccgatgccgatgtaccccacgatgtattctttgccgatgccgtggatgcacccatcgtatcccatgcgtggatcgcaggtgccgctcgtgccaattcctcggctgaaacccccgcagcctgcatctgctgtagcagagccaccggccaagaaggctaggaagaccaagaaggttgcaagtgttagtctcctggggttgatttgcgttgcaatgctttgtgggtgtttgattcctgcagtaaatcggatgtatgactctgttgatgctggagaaggtgctgcatacggtccatctcatcgtgggagggtgctggctgttgaggggcctcatgataatgtttcagatggtgtcgatccaaagccgccacagcgtgccagtgagacgcttccagcactgttgtatctaccaaagaatgggaagcatgtcaagattaatgggaatcttgttattaagtcgattgttgctagtgagaaagcttcattgcagatgtctggcaatgatgggaagcgtcctcaaaaccaagaggaggagactagactggcaattcctggctatgtgactccattgaaagctggagaggttatggaatcaaccgaaggaatgatgaacaatgaactgttggcgttagctcctgcagatggaagcatgtatagggaggaggatggattgctgccacagtggtttagtgaagcaatgtctggccccctgctgagctcaggaatgtgcactgaagttttccagttcgatgtgtccccatcatctgctcatccaaatggcatcattcctgtctattccaatgccatgtcaaactcgtcacagaacttcactcaagatcttccccctgctcgtgttcgcacggtcaagaacagaaggatttcgtactccgaggccattcctctgagaggttcaacatccaacgacactgagcacctcaagagctttggcagtacgaagcctgtttcgtcagtggtcgtctctgtgctggctgatcccagagaggctggcgatggggatggtgagggaaggatctcttcaaaatcattgtcccgcatcttagttgtcgttcttatagatagtgttaagtatgttacgtactcttgtgtcctgccgttcaaaagccatagccctcacctttagaaacaaacccaagactacacagaaatggccacgccgatcaactcccttcaatgtttgtacaaagaaattgtttacacgtaacaagtacaacatcgttaaataaagctcgtgctgataccacggctgcacaatcttagcaacggcttactattggcgtcgtctctttatcctctcgagggcgcccagctgctcatttccttgggcacctgagctttcctcgttcttctcggcagctctcttgccgagctcaccaaataccgcagcaggaacactcttctccgcaatttggacatcgggttcctcgtcgtcactctcgtcgggcagctcaatgtcctcgttgttaccagcctgttgcctgctgctgtctgcctgcgcctctactccagcactgacaaaattcatcgtcctgttagcagaggctggggcagttggtgttgctgctggtgcagtggatggtccaggagccagttgcctttccaaggctgccatctcgtcctcagggacgccagcacgtttcagagtgtcaacggcttcgtccaggtttaacctatgatccttctgcatcaagtactccggtagtatgaaatgtgtctgcacaacattacaagtcagtgttaatttgtgatacaagcgttaatgtcaatgtcaaactgtaaactaagttgataagtgcggcatacctgactacggctagcagccactgtccgtttgatacgaagcatctccctgaatgtgtcttcgttaccgtgctgaatctcaaagtcattccacttcttccaaaagtcaggattatttggatcagcatagttggatgcatgcacatagatggcacgcgaaacgatcaatttcaccaaggcttctctctagttcagcgaacttcatgcacattgtcagaacatctttgtctgggaggccagattcaattgcttgctgcaaatgtggcaaca

SEQ ID NO: 2298 - DNA, 2037 bp, Zea mays
ccgggcgccgcccactacaaataaaaccccttccccatggacgtcgcccaagagactcactgctactcgcgctcttgccaccgtctactctccaacccttctgccatccctcggcaccagctcgctgacgctaccgccacccctaccgccaggccgcatagccgtgctccgctcaccttctctcgcgctacagtctcaagggtagctagccaagctaccaagctcgtcaggagcgagagaaagaggccgccggcggtgcgcggggatgatgatgatgagcagcggccgggcgggcggcggggccaccgcggggcggtacccgttcacggcgtcgcagtggcaggagctggagcaccaggcgctcatctacaagtgcctggcgtccggcaagcccatcccttcctacctcatgccgccgctccgccgcatcctcgactccgccctcgccacgtcgccgtccctcgcctacccgccgcaaccctcactgggctggggctgcttcgggatgggcttcacccggaaggccgacgaggacccggagcccgggcggtgccggcgcacggacggcaagaagtggcgctgctccaaggaggcgtacccggactccaagtactgcgagaagcacatgcaccggggcaagaaccgttcaagaaagcctgtggaaatgtccttggccacgccggccccggcgccggcccccgccgccgccacaaccgccaccgccacctcatccccggcgccgtcctaccaccgcccggcccacgacgccacgccgtctccgtaccacgcgctgtatggaggcggcggcggcggcggcggtagcccttactcggcgtcggcacgcccaggagcaaccggaggcggcggcgcgtaccaccacgcgcagcatgtgagccccttccacctccacctcgagaccacccacccgcacccgccgccgccctacaactactccgccgaccagagggactacgcgtacgggcacgcggccgccaaggaggtcggcgagcacgccttcttctcggacggcgcgggcgagcgggtcgaccggcaggccgcggcggggcagtggcagttcaggcagctcggggtggagacgaagccgggccccacgccgctgttccccgtcgccgggtacgggcacggcgcggcgtcgccgtacggcgtggagatgggcaaggacgacgacgagcaggaggagaggcgccgccagcactgcttcgttcttggagccgacctgcggctggagcggccgtcgtcgggccatggccatggccatgaccatgacgacgccgccgccgcgcagaagccgctccggcccttcttcgacgagtggccgcaccagaagggggacaaggccgggtcgtggatggggctcgacggcgagacgcagctctccatgtccatccccatggccgccaccgacctccccgtcacctcccgcttccgtaacggtgggcactgtacgtcttgttcgttcgttaacctgttgttacctcgatcgtcatggctgactagacggtctcgttctcatccaacgtttttttcgtgacttgtgctgttacgatctgcagacgagtgatgccacatcaaacctggcgctggaaactcggaacgtatggtgctgatgctgaccatgagatgtaccgtttcgctcaaggccggccgtcatcaccacggccacatcaaaccggtttgaagaacttgggaaggccgaatgaaacctccagaagaatgatctgtcctctttttctccattttcttttttcttttagtattactctgtattgcttcgcgtgtaatatgttttcctgtaatatcaagtgagggcgtttctgaattctcatgcagcatttgggctcagtgactgttatatctcgtgagcgtgcacagctgacagctgctcggtttgaagacagtggtactactgtgctaaaactgcatcccgagggtaatgaggccatgcgacgaatacagaacagtaatcgccatgcttcatccgacagtatatataaactattggttgggacagcgggt

SEQ ID NO: 2299 - DNA, 1647 bp, Zea mays
cgggtttccagtgaaccgcccaaaggttatttcggtcaagtcgcttctctcagtggaaacccaaaaaccctcttcgaagttcgatcccagggccgctccggcggcggcggcgcgttgagatggctgacactgacagcgcggagaccgagaaagagaagatggtagcggatgatgggggcaagcccgcagagctctcgaagagcgcgaggaagaagctgcagaagcaggagcggcaggcggaacgtaaagcggcccgaaaagcggcggagaaggagcgacggcgcgccgacatagagcggcggaggcgtgagtgggaggacgctcttgccgccgcgccgtcggatgaggcccgggccgagatggtggcggcgcggcgggagacgcggcgcgagcgggtgggccggcgggcggaggagcgcggggcgcgagctgaccggctcaggcgcgcggctgagggcgcgggccagaaggtggtgctggacctcgagtttgcggaccttatgaggcccaacgagattcatagcctcacgcagcagattatgtactgctatgcagtgaatgggagatctgcaaacccagctcacctgtggctgacaggttgcagtggtgaaatggcgacccatcttcagagaattcctgggtatgataagtggatcattgaaagggcggccaggccttatattgaagcatttgaagaccgtaaagaaaacctcgtgtatcttacagcagatgctgagacagtgcttgatgatctagacatgtcgaaaatatacatcatcggcggcctggtggatcgaaacagatggaaaggcataacactgaagaagtcagctgagcagggaattcaatctgcaaagcttcctattggaaactacctaaaaatgtcaagttctcaggttcttacagttaaccaagtgtttgagataatgttgaagtttgtggaaacaagggactggaagacggcattcttccatgtgattccacaaaggaagcgaggagaagctgagaccagagatgacgtggaaaaaggaggcctggatgacaacgatggcgccgccgaaggggctgcagatggagaccattccgaggaagacctgaacaagggcttcggtgaggaggaggacgatgatggggacgaagagctggaagaggaagaagcagatgtctccaacaagaggcagtgtgttagagttgaaaacggggaagctggggatgccaccgtagcagaggtggaaccaaacaacggcggcggcggcgggggcggggaccgctgaacagtgaacagcaccaccacgtttgtcgctaactcgctattttcacaacagcatcggtattggatttttgagcgttgtctctggcatttttcatgtattttagggctagtttggcaaattcatttttccaagtgattccgattttcctaaggtaaaatgaactaatttccttggaaaaatgaaaaaaaaaatcactagtaaaaatgggattgccaaactgtcctttattagacaatttctgccgtactctactcggaactgaataactgaccagcttagttaaagttaaagcaggccaatgaatcgagcaatggtgacaggaactgatgaacagcgaagctcacgtttgtttctctttcgtatatgacagcat

SEQ ID NO: 2300 - DNA, 1797 bp, Zea mays
cttcactcactcctgtcctctcctctcgaccagctgacctcgctgacggagcacacagccacgccgcagcgccgcgtgggtgtctgtctatagccttgtaggtcgttcgcaggtaggtaaccgtaacctagctagctcgtcgggatgatgatgatgagcggtcgagcggccaccgcggggcggtacccgttcacggcgtcgcagtggcaggagctggagcaccaggcgctcatctacaagtgcctggcgtccggcaagcccatcccgtcctacctcatgccaccgctccgccgcatcctcgactccgccctcgccacgtcgccgtcgctcgccgccttcccgccgcaaccctcgctggggtgggggggctgcttcgggatgggcttcagcaggaagcccgccgacgaggacccggagcccgggcggtgccggcgcacggacggcaagaagtggcgctgctccaaggaggcgtacccggactccaagtactgcgagaagcacatgcaccggggcaagaaccgttcaagaaagcctgtggaaatgtccttggccacgccggcgccggcctcctccgccacaagcgccgccgccgccgccacctcctcgtcccaggcgccgtcctaccacagcccggcccccgccgtgccgtaccacgcgccctacggcgccgcgtaccatcacacgcagacgcaggtgacgatgagccccttccacctcctccacctcgagaccacccacccgcacccgccgccgccgccgccgccgccctactactacgcggaccagagggactacgcctacggcaaggaggtcggcgagcgcgccttcttctccgacggcgcgggcgagagggaccggcagcagcaggccgcggggcagtggcagttcaagcagctcgggacgatggaggcgacgaagcagccgtgcaccacgccgctgctcgtccccgccgccgggtacggccacggcgcggcgtcgccgtacggcgtcggtcaggccaaggaagacgaggaggaggaggaaacgcggcggcagcagcagcactgcttcgttcttggcgccgacctgcggctggcggagcggccgtcgggggcacatgacgccgccgcgcagaagccgctccggcatttcatcgacgagtggccgcacgagaaggggagcaataaggcggggtcgtggatgggggggctcgacggcgagacgacgcagctctccatgtctatcccgatggcggccgctgccgacctccccgtcacctcccgctaccgtacgtgatggcggcgcgcactgtacgtcttgttcgtgaacccaaaggctgttaccgtaacgagtactacgtctctttagcttcatgtctttgttccgaccatggtttttcgttctttgtgctgtttgcagatgagtgattgccagcaagaaatgttttgtggttgctgcgacctcgaggtggcgaggccacatgaaaaaaaaatactggagctggaacacgagtggttctttcctgtgccgttttgctcagggccggtcggcacggtttgaagaagttgggaagagaagtaaaataaacctccttgggagtgttacgtttcctgtaattgcttgcttcctttgctgtacctgtgagacgacgcttagtgctagaagtgagggcctttcctgatctcagctctggtctggatttgccttttcccgctgtcggattcctctgcctgtctgtgatggtttgtctgtgatggtttgtgctcagagcctgcagcgaatactaaaccgcagtaattaatcaccatgcttcacccg

SEQ ID NO: 2301 - DNA, 2739 bp, Zea mays
cgtcccatcgccgtcgtcccagtccacgtccacgtccacgccgacgcacccgcatccctctctcgcctgcgccgcagctatgtcgggctgggacgagggcgccgtgttctacagcgaccaggcgcaattcccccgcggcggccctggcggcgacccagccgccgacctcacccgccactccgccctccgcaaattcaaggagtttctccgcggcttcactggccccaccggcgacttcccctaccgtgagagcctagtacacaaccgcgaccatgtcaccgtcgctattgaggacctcgacgccttcgatgccgagctctctgacaagatccgcaagtcgccggccgattatcttcctttgtttgagacggctgcggccgaggttctcgcaagtctccgttcgaaagtcgccggcgagaccggagagatggaggagcccgtcactggagatgtccagattttcctctcctccaaggagaactgcctgtccatgagatctgttggggcggattacatgtcgaagctggttaagatagcgggaatagcaattgctgcatcgagagtaaaagctaaggccacccatgtaactcttatctgcaagaattgccggagtgtgaggacagtgccttgcagaccaggcctcggcggggctattgttccacgttcgtgtgaccatgttcctcagcctggagaggagccatgccctctggacccttggattgccgttccagataagagcaagtatgtggatctccagaccctcaaattgcaagagaatcctgaggatgttccaactggtgagcttccaaggaatgtgctgctttctgtagataggcacctagttcagactattgttccagggactagattaactgttgttggcatctacagcgtgtaccaagcatccacaacccagaagggtgctgttggtgttaagcagccttacattagagttgtgggtttagagcaatctcgagacaataactcaaatggcccctcaaacttcactcttgatgaggaaatggaattcaaagaatttgcacagaggccagatgcatatgccaagctatgctcaatgattggtccttcaatttatggtcattctgatgtcaagaaagctattgcatgcttgttatttgggggatctaagaagaggctacctgatggtgtacgtttaagaggggacattcatgtcttgcttctcggtgatccctccacagcaaaatcacagttcctaaaatttgtagagaagactgcacctattgcagtatatacatctggcaaaggatcgtctgcagctggtcttacagcatctgtaactcgtgatagtagctcgcgtgagttttatttggaaggaggagccatggttttggctgatggtggagtagtttgtatcgatgaatttgacaagatgagacctgaagacagagttgcaattcatgaggccatggagcagcagacaatatctattgccaaagctggcattacaacagtactcaattcaaggacttcagttcttgcagctgccaatccaattgcaggacgctatgatgatcttaagaccgcgcaagataatattgatctgcagacgaccattctttctagatttgatctaatctttatcgtcaaggatatcagaatgtatgatcaagataagagaatagcaagccacattatcaaggtgcatgccagtggtgctgcagcttcatccacaaacacagaggggagtgaaggagagaattggctgaaaaggtacattgagtactgccgcgccacatgcaaaccacggctttcagaaaaagcagctgagatgctgcagaacaaatatatcgagattagacagaaaatgaggcagcaagctcacgagacagggagggccgcagctatacccatcacagtgaggcagcttgaagccatcatccgtttgagtgaatctcttgcaaagatgagattgacaagtgtggctacaccggagcatgtcgaagaggcattcagactgttcaatgtttccaccgttgatgctgcaagatccggaatcaatgagcatttgaacctgtcaccggagatcgcaaacgaaatcaagcaagcggaggcacaaataaagagaagaatgggcatcggcagccacatatccgagcgacggctgattgatgatctaaaccggatggggatgaatgaatccatcgtcagaagagcccttctgatcatgcatcaaagggacgaggtggagtacaagagagagcgccacgtgatcgtccgaaaggcttgaggtggagaggccagtcagattcacggcatacaacgtacactggaggcggtccttcctcttcggacgtgtgtataccttcactgaaactgcacctttgtctgtccagaggacgaggcatgccttagttgatctctgacatgactcttgtaatctgcacacgagtggatgcaaccttttgcttcgtgcaaatggagctttgtagctgtaccacagtagtctgttgctgcctgtgatcctaaaccatagtgttgtgagcatgaagacttcgtttttttggaagtaaccataggttctgaactgcattgtgctgtgtagctcgtcaatcaattctggaatgcgaactttgtttactgcatcaccaggagtaggacagacagtgtgtggagcttagttgtaataattataataatatatgctatgtgttggggaccttcggcatccgaaggtcctcaaaaacaggatttaacagt

SEQ ID NO: 2302 - DNA, 2641 bp, Zea mays
cacctcacctcacctcacctcacctcatgcacaggccaagcgggcgcgcgaggctcgcgggaaacgcaaacgccaggctacgggcaccgatttgcacgtgctgcatccaacgaacctggtttgatgcccttgtcggcatcggggggcttcgcctacccgcatcacccaccctctccccgcttccctatccctcacgcagtcaggagatccccaattccccattcaccaatccccagtattgtagtagggggaaaaacgagagaaaagaaacagcagtagcggaggcaagacgaaatggtggccgccgtcgcgtcgccttcgtcggcggcaccctccgccggccgtccccatccgacatacaaggagatgatcatgcaggcgctgacggagctgcgggacccgagcgggtcgagccgcagcgccatcgccacctacatcgccgaccacttctccggcctccactcgcgccacgatgccctcctctccgtccatctccgcagcctcaagtcccatggccaacttcgcctcgtctctggcaactacttcgtctccaccgccgctcagcggcaggggcgaggctccaacatcccgcccaaccccaaccctgctccggggcagaagcgtggtcgggggcggcctcgcaagtacgcagattcagccccttccgcttcgatcccggcgtttcaggacgccaagcgagggcgtggacgcccacgcaaacgcaagagcgcccaggacccggtggcttcctccccctccccttcgccgctacagggagcaagtgttccgccgcctccatctggggtcaagagggggcgtggacgccctcggaaggacgcccttgtccctccgccttcctcttcttcgccactgctgggagggattgatccaccgcctccatctgggatcaagacgggccgtgcacgtcctcggaaggcccttgtccctgtgcgttcctccttttccgagctgctgggagctgttgttctaccacctccgtctggggtcaagcgtggccgcggacgcccgcgcaagagtgcctaccccgctgtggcgccgttggtgggagctgagaagggacctgctggtggacaaccacagaggaataccactcctctctcaccgacacctgctaccatgtcccacagtggtaagagtgagactgtccggctgcccaaggttgctgttgatatcagtgctttgcgtggttcctccatgaacatatctgcttctagtaacagtttggttggtgcgaagcggggaagagggcgcccacctaaggttgtggttgctgggaaagagaagatgcaacctgaatctgtgcagtccgtggatgcttcattgactaagagagggcgtgggaggcccagaaaggagaaggcattggaaagtggccgcatgaaagcctcgcagatgactgagggtcaacgtgaagctctgactgcagaccaagctggggctgtccaaaatgaagtagaagatagggatttgcaatccttgggtactcctttgacagagaagagaggccgcggtcgtcctagaaagaggccgttggaaatcgaaactgcaaaagcaggggctgctaagcgtgggaggccaagaaaggagaagacatctgaaactggggacttgaaagttgcacagatgactgagggtcggcatgaagctctgcctgcacaagctgtagaccaaactgggcctgtgcaaaatgaagttgaagctatgattttgcaatcccttgctactactcctttgatggagaagaggagtcgtgggcgacctagaaagaggccattggaaactgaaactgcagaaacccaagttgctgcatcggtggagaagcgagggcgtgggaggccaagaaagaagaatccatcggcagggtggtctgcaggaaccagggatactgcattaaaggggattaagagagggcctgggaggccaaggaaggccaggccttttgaaactgagtctgtgaaaactgcacttgaggtgtctagggacttgacagaagatgggcctcaaaaggatggggatcttgtgtcagggaagaaagcagatactcatggtgtggtttggtagtgtcaactgaggaggtagccattgctcccatggatgctgggtgcgcagacgccaagggttgatctgatggatgtgggcaccaagagtcactagtgctctgatggtgcgaacaagaacaaaaaagaaataatgatagtacctgaaaggctaaacagaacatgcagctaataagtgtgttcatggatataattaatagccatactgcaagtattgctatatgtttgcaccagtttgattactcgtatgtttttgagcagttccattggaaactgcgtttgatgggtttcacttttgggggttggatttaaatatctaacccacatcctctttctttgtcaaggactataacatttttgtaattttgttgcttgtactggaaactagccatcataaggttcattttgttttccagtttcaacatcttttagtgatatgttcacataatatctctgttttgtgctttatttggtgtgtctattgggtgtttggttggaggaatgggacgagttggtccactattgcttcattcagtcattcctcatactaataagcacagagt

SEQ ID NO: 2303 - DNA, 1088 bp, Zea mays
ccagagcaaaactgttctcagctttcgtgaatccatccacgggccacccaattttctcctgctccggcccatacaaaatctcaaaatcctccagatgaaggtcgctcggcccaaacctagtagtgtctagggttttaccctctccaacacgacgaggttttgctccgacaccgacgcgacagccgacaaggcagggggagaggccgagaggggaaatggcatcgttgtcccgcaccgctgctgccgctgtcgtggccctgaggtcggcggtccgctccgcgccccttaccggccgcgtcctcggagcgccactaccttcctttgcctcgccttccgctacccgctccgcccggatcctccgcaggtcggcggccgcggcgtcggcggggctggaaacgctaatgccgctgcacagcgcggtggctgccgcgcggcttaggtcctgcatcgccgtcgactcctcctgctggtgctcgctctcacaaggtttaaacaagcgcatctgaccatggctaggagctgagcagaagagaagtgaggacactgagttaaaacgaagtcatttttttgttgcagatatttgtaacatgtactactttgatcgttgctctatgcatttgcccatggcttcataacggagcatgccaatttgttccttgtaacttgcattggttcttattttcagtttgatcatgatcatgacaatgaaaacaagacttgatttacattaaaacacactttttttttctatcagctgtgcaaagttactccatttgaaacaatgccatcatatggcatgccttgtctccatggcctgacttgctcttatatttggtgatataggatatgctttgcctttatgacagcgaggcgagctgcacctgaagaaacaaaagaatcttaggaattacaaacaagggctgtactgtaataatgtggttcttgtaaaccaattttgccttagaattctgtaacttgaatcatccacagatgtgcgactgtcttttgtttatgtggatctatgaattacctgccgctcctcgtttgaactacttgcaattccattatagcatcatttgaaaatggca

SEQ ID NO: 2304 - DNA, 2179 bp, Zea mays
tgataaccccccaccttggatctcggccgccgtgttctgtgcgtgtctgcgtgagcagcgacgtgccgacagccgaagcgcccgagccatcccatcctcccctccccccaaaggccaaacccattcgattcctccgccccgccggccgaaaccaagtttctccgcggccgcccggatccccgacccccggccccgagcgttccatgggctcgccttccgcatcgaggcattagcaagcctcgcgccgcactgccgagcccccgacgcctgcctttgcctcactggttttggaaggaatccaagatgggtgtaatcagcacagtgctgggtttctctggttttggctttgggttctcggctggcattgttattggttacttcctcttcatctacgtccagccaactgatgtcaaggatgtcaaggttcgcccgcttgtagaatatgattcaaaatccttggagggcatccttcctgaaattcctttatgggtcaagaatcctgactatgatagaattgattggctgaataggttcttggagttgatgtggccttatcttaacaaggctatctgcagaactgcacaggatatcgcgaagccaattattgctgagaacactgcaaagtataagatagactctgttgagtttgaatcacttactttgggtagcttaccacccacctttcaagggatgaaagtctatgtcacagaggagcaagagctgataatggaaccatctcttaaatgggctgcaaacccaaatattactgttgctgtaaaagcctatggtttgaaagctactatccagattgtggatctacaagtctttgcatcacctcgcattactctgaagccattggtgcctacatttccttgctttgcaaaaatccttgtctcactcatggagaagccacatgttgactttgggctaaaacttcttggagcagatgtaatggctattcctggtctttacagatttgttcaggagaccatcaagaaacaagtagcaagcatgtatttgtggccgaagacactagaagtacctataatggatccctcaaaagcatcaaaaaggcctgttggaattctacttgtgaaggttgtgagagcccaaaatctgcggaagaaggatctgctgggtaaatctgacccatacgtgaaacttaagatgtcagatgataaacttccatccaagaagacaactgtaaagcgcagcaatctcaatccagagtggggtgaagacttcaagtttgttgtgacagatccagaaaaccaggctcttgaagttaatgtcttcgactgggaacaggttgggaaacatgaaaagatgggaatgaacatgatcccacttagagaactcctaccagaggggactaaagttactaccctcaacttgcttaagaccatggacccaaacgatgtacaaaatgagaagtctcgtggtgagcttactctagagctcacatacaagcctttcaaggaagaagatatagagaaagaagatacacagggtgctgatgtgatagagaaagctccagatggcactccagctggtggtggcttgctttatgttgttgttcatgaagcccaagatcttgaggggaagcaccatacaaacccatatgcaaaaataattttcaaaggcgaggagaagaaaactaaggtcatcaagaagaatagggatccaagatgggaggatgagtttgagttcgtgtgtgaggagcctcctgtgaatgataaactgcatgttgaagtcataagtaaagccccgaaggcagggctgatacatggcaaggaaactttgggctatattgatattagccttgcagacgtgatcagcaacaagcggattaatgaaaagtaccatctcatagactcgaaaaatggtcagatccagatcgagttgcagtggagaacttcctagacaggaaggagccagaatgccttgatgttcctctattcagtttgcgtatatctgtgattgagattgaggtcatgtagatatttcttttttttatagacatctgttgttcggatcttctcttaatcgatcaagtttccgacaagaactatgcagacatgttacagaccctgagaatggaactgaacaaatgacacgtcatacaattacactcggcattctggcatactgagaatttacaccatgctccaaatatatt

SEQ ID NO: 2305 - DNA, 1853 bp, Zea mays
aacacatcgagcgactctgtttatatcagaatcgcgccaacgcgtcgccggcagcgtcgtctcgtgtgggtcgcggtcgcgaccaagcgacgacggcgagggagggaatgtacgccgctgtcccccactctcctccccactcccaccgcagtccatcgacagtggagggttcccggaagcaaagcgccagcggcaggtaagcagaagcctggctagctggcctctggtatgtggttggctcaaggattacaggatttcaatcagtaacaatcaagtatgaggaaggaacaacaacgggtgtccaagcttgggtggttggcttgccggttacagcaagtcaattagtaactacagatgggaggaaggcgaccgacgtatactacgcgtgctcgatcggcggcggcggctctacgacccgcggccgggatgggtcggcagccgtgctgcgacaagctgggggtgaagcgggggccgtggacggcggaggaggaccgcaagctcatcaacttcatcctcaccaacggccattgctgctggcgcgcggtgcccaagctcgccggcctgctgcgctgcggcaagagctgccgcctgcgctggaccaactacctccgcccggacctcaagcgcgggctcctcacggacgccgaggagcaggtcgtcatcgacctccacgccaagctcggcaacagatggtcgaagattgctgccaagctaccgggcaggactgacaacgagatcaagaaccactggaacacgcacattaagaagaagctgatcaagatgggcatcgatccagtcacgcacgaacccctcgaccggaagacaaccagcagcggcccggctacaacctctcagtcaaccaagtctgacgaggcgaccaaggagcagagcccgcagaacgacgacgccgtgataagggacgtgccggccgatggttgcagcccgacggaatcgagcacgaacaccgtgagcaccggcggaagcagcagcagtggtggcggcggccatgaccaagacccgctggtgaagtggcttttggaagaggagcctgccaccggcgacgaggcgtggctgaacttcactggcagtgtcgacgtggacgagttcagcagcattgccgccggtccggagttgttgccgtgggatggcgcgaccgactggctgctcgactaccaagattttggattgggggactcgagcttggtcgatggctacatggtcaacaacaacagctcaaacggagcaaagttctagctagctagccgaagatgtcatctcatctgcttgtgttgctttgctgccagtgaacgtagatacgtaagtaataaaagcattggtatcgaggttgtcaaaggtggatgaccacatcgcaggaagatcatgaagagtccttgcacgcactcctgtatctcgaaccaactaacggctgggatgcaattgagaaggggaggagcacaggccaatcaatctcaaagagataaaactggttcttgaagatctcgaagaaagatgtgtttcttcacaatcacaaagagaggttgtagaagttcttgctgttgtatacatggttgcgtatatattgctaaattgtaccttgttaggccattttgttcgcaaattgcacgagtcactaattagtcagcaaaaatgtgtgcataaagaagagcagttgaaatcgcctctttgtacgttgtgggtgacgttcttttagttacgttgtggatgacgttgatgcatttatagggtatttggtttgaggaataagttatctggtttgtagaatggaataagttatccatcatcacctcattaatcatggttagtactaacatgagtaattgagtcattccacc

SEQ ID NO: 2306 - DNA, 1839 bp, Zea mays
tcgcacctcattggtttgctacacgtgttcctcgtcagacactcaggctcacagacgcgaaggaacaccgcccaacccgaaaccgtttccaaaatgcaaaactcgactccacgcgtcgcccttcttctccggagagatcgtttaaatagccccgtaccaaatccaattcgtctctcctcaccggagaacagaaacgatacggttaatagatagcgaagaagggcagcaccaccagtagcagcagccatgcccgctcgcgctcgatggcgactcctcgcgctgccgctcgcgctcttactcgttgccgggtcggcgcatggcctcgtgaagccggaggcagccgcggcgcccaagccccccgtccccaaggccatatcggacctgagggacgcgatcgtgaaggggctgggattccaggccgaggggctcaaggtgtccgggttcgacgtgcgagacgcgctcgtggggcacgcggtggcgtacgagttcgacatcgaggtcggcaggaaggtcctaccggtgcgcctgctggaggacgtcagccggtgggacttcgtcgacctccccatcttccgttcccaggccgacgctgacgatacggcgctcgccgagatccggcggaccgggacggggagcatcgttgagcctaccctgccgcccttccagctcgccgggcccatggagctctggatccagaacggcgacgacgtcaggcttgccttgccgcatgatgtggacgctggtaccttgaagaaggttgttctttctgatggtgcagtcgtaacagtgaagggtgctagagctgtgagcctccggttgccgcttgaattaccacttcctctcaaccgtaccacttacaagggtcgcctctcaagcctgatatccatcgcacaagccctgcgtggtgcagcccggtctaatcagaaacccctgctctctcttcgcgttgagggtccagtttccttgtcctcgactccttccatgtctcccaaggacaagctcaagctcaaacggttggccccaggccaagtggagctctcctcacaggcgggggcaatccctgctatcaccgaagacgaggatgaaccacataaccctggattgtggcctcttttgtctctgaatggttcagatggcagcctgcaggggtttgaggagctattggcctcagtacttggaaagaaggcaggcgagaagggtaccttcaagctactgaaggcacgggcctcggctcaaacctatgtcaagatggcattcacggtggagaagaagcttgctgaaggggatgtgaactggtcaaatattccagaatggaagacgaagcccaagaggatgagagcgcactatgaagtccttgctcgagtggaggagggtcaggcgatccctgagaggatagcgcaggtacagcctttccaggccaacgaggccatgtcggagagtgtgctcaccggcaacgtcacgaggtcgaagatggaaatcgtccatccaccgccggtttacttcactctctgagtgagggaagaactggatgctgtttgatgttctcttcagagctactacacgttgggtggtgggtagtttacgctggctcgtaggcaacaaagttgtacaagcggcaagagtttgttgcctatacactgactgcgttgacatgaatattgacgttctatgtgtactgaaaggctggcaagcctttaatattatcaattggaataatgaggaataagaaaattctgtacatctttagagggccaaagggctgagttcttagtactgagaaattgggtagccttgtccctgtctatatttatatcaactggaacttgttgagtcgtgaag

SEQ ID NO: 2307 - DNA, 2093 bp, Zea mays
ggaagagaagtggagcaccagcgaaccgcatatgctcggggttcttcgtcgcgcagccctcgccgcagcgtcatcgccggcggcggacctccgacagtttcagtgtgcttaccatagaagcagtgagagattatcacctatccgagccattacaaaatatctgcaaaatttctcgactactttttgttgcacagagaagaccaagaagtttcatatggtcttaattgggctattgctggaaaaggtgtcattgtgaaagataaggtcctccataacttggaaacatctgagcttcagaaaggtggcgctacttaccctgactttttgtctggtataccacttcatgttagaggagatgttattggtggtgtccctggtgtttctaaagctcaatttgcaaagcttctaaaactggtaggttctaaattttggcttcaccactcaggccctgttcgttttttgtcaaacaatggggattgagggggaacaaatcccctataagtcaaaatcctcctcaatcccttccaatccccccccccccaaatccccatgattttgggatgaaacgaacatggcctcaatgggatgatgatattcaatgatgattgtcatgaatggagctgaaatactgttagtccctttttttagcatctgattttttttctcatttttaatttagttgtgacatctccctatttgttgaagggcagtcctggtgcaacaatgagagctgtctcactgagtcatcaggtcacgggttcgaagtagtctctccgtatttgcgggggaaggcttgcttcggtttatccctatcctagacgtcacatatgggagcctccaacagtggatctacctttttttatctccctgtttgttgacagactacttgcttgcataggtgacgttccatctttcatccatctcgtgtctatatgttcaagatggcgccattggttcctcagcagaatgtgatgcaaaggttcgggtcattagtgataatccctctgctgttatgttactgtcgaatgtcctttggaaaataccagatcgtgcgatttcccatgacacatcccctttgactatatatgctaccagttcaataagtaacaacgttaagactgttcttggttctggaacacaatatgctaatggatttgctgtggcggatattgaacgatcatctctaatcctatgcggtaaagcatttgctgattcagctatcgtgaaagatgcacttactgctatgacagccccaatattgtctgcaagaggaggcctccctgttccaggatggattctgaactttggtggttctactgtattattgtttgccccagtggaaatcatgatgtcctgcgtagaaatccacaatgctctattgtccattgactgtggtgcagtcatatcttccaaggggtctactgtgcttttcccaacaaaggcaagcagggagcagaaactgcttaccaaaccaactgcagtaattatcgtatcatctgatagctctggcgccataccatctgtatgtaagctctctcctggccaggctgcctaccatttcttggctggatatcacgatggaaaatttgtcccagcatacaacagagccccctctcctgctgacccacttgcacttgcaagttctttattctcacatttgaaagaagatgatacaccatcgtatctgatcaacgctaagcactctggaaagtacattgacggcaatgggtttatgaaattattaaagctggcactatctcacgatcttcctgacatcaaaactgaaggctctagagttggggaactcaaggggaagtacaggagctttctatccagcaagtttggccaatgtttacccgaggaattctctttttaggagatacaccctgaggttgcaatgaacatgtatatttactggcataggtttacattttggtttgaaaaggtgtcagtattcccattctgtctcagtttcaatgtaatactctattaccttacattgcatctttccgcctcctggtgtttggatatactgacgtaacgacaatgtagctagtacctacatgcatgaattgtcttgtgcactccgcttc

SEQ ID NO: 2308 - DNA, 1884 bp, Zea mays
atcggaaggccccaaagcccgtgggccgagccgagcgtgacggaagcagcacgcaggaccaattttgaaaaggggctgcaagacgcaagacgaccgttggaagagccgcctcttcgcctccgcttaaaagcctcctcgcctcgtcttccaaacccgagagcaaacgagaaggacgccggagaccgagaagcaatctctcctccccccggccagccgaccgaccgaccgacccatggaccgccgtcctgctctcgccgtctctccgcgcccgccccgggtgccccgcccgcccctcgtgccagcctcctccgtgcaaacgcctccaggatcgatgaagaaggcggcggctccgatgcgcgcgtccgtctgcgcgatcccgtcgccggtccgcttcgagcccagcccgatgcgcgcctccatctccgctctcccgtcgccgatccgcgccgaaccgagccctatgcgcgcgcgcgtgaccgccgcgctccagccaccaagtcgcgtcaagctcgacctggctgcgtcgtcgcctcctccggcaagggcggcggccgacaaggagaacttcctcctcgccgcggctccgtcgtccccctcggcgagggtggggttcgacaaggagaacctcctcccggccggcgcggacgcccacgacgagcttgtggcgctcaacctcgccgcgattgccaggacagcgggcacgccgtctggtggcccgctcttcgtgcggggcagactctacgacctctactcggcgcgccgcaacgagcggctcaagcgcaagcaggacttccccttctattccgaggagttcgcgtccgcggcagtggaccccgagacgatggccgagaacccctgtgtcgccgtcgagctgtccaaacgccgcgtagccaagaaggcctacgccgccagcggcgcggagtccgtgaggaggtctatgccagccgtcgacttcgcagcatgccgcggtggagacttggggccgaggtcctcgctcaggagcagtaaggagatgaagaaggcttccgccgcgtccggcgccgtttccatggccaccaaggtgaggagggtcaaccccaggtcttcggttcgccggttctgagtgttgtagcgctcttcatctgaggttttctagcttccactctctggttcgatatgtcactgtcacatgtggatttggtgatgcggtctacctataactagtagatgtcagtaagaaacattgccagttttttgtgctcggaattggtttggcgagcaacccagatgcgaattgcgaatcaccttggtgttagacacgcagagggtggaagaagagagcatgagatctggaagggaagcagagatgtaggcaacggtggtgttcgtctatgttcagtttcttctggtttttccataatcctcttcccagagtcacccttatacccttacacgggctcggcccaatgacacagcgcttagcacattacatggcccactcagggcccgttactctcacatttccgcgcttacggctttggttttctgtcgccgtcgccctcctgttcttcatgttgctgcaccacttcatggtcttcaggcaagtcaggttggctttcacctttcttggtctgccgctgctgctccttgctggacagcgccgtctcttcctcgtcggctgcctcttctggcgtctcccttgacatattgctgacatttggctgggtcatattctgatgggaatatattactacgaggtggtgttaatataggttggttgcagcaaggtagtctgtgctctgaatttggttctttagaatagtgaccatagttgccgtaattctatttatacgtcagtctatcatgtgtcaacctaacatttcgaatatatcttgcattcttttc

SEQ ID NO: 2309 - DNA, 1481 bp, Zea mays
atatatacataggggttgcaaactgcagagcagcggaggcggaggtggggggcggtgaggtcagtggtcacagcgacatggaccgatcggtggctgcttgccatgcattaccacttccactgctccgatccatgcatcatatcctgggtcgctccatccatcccgagctcgatctagcacagtagcagctggtagtagctagggctctcttgccgctgcaggcgagagaaggaccacgcacgaggcttgctgcatcggtgttccgggaggagaacacggccgcgagttattgctgctctcgtttgctgcatcttccatgtggagtctccgtccgaccgacgaggcccagaggtggaggaggaggaggaggatgatggaggagagagcgggcgagccgtcggaggtggaggagcagggctgcgcagcgaggccagccaaaagtagattcggcgccgtgggcccgccgtcctccagctgaggaggaaaggcagctatcggcgaggaagggtggtggactggtggtgctagcggtggtggtggtggtggtggtggaggatcccctctcacgtcaagcgctgtgtggaaagcataaaggcgggaggaggaggagagggcgaaggcgcagagcttccccgccgcacaaagcgaaaaggcttcagaaagaagaaagcttccgccttgggagggagagcgaggcatcctgcgtgtgagcgtgcgataaatagcggctccaggtccaggctgagggagagcgcgtctctggtgctctcgcaaccaccgtgcgcttgctttcctcctgctctactccgttgcacacttgtactaggcctggaggtcctgtagctcgcctggtgctgtgtcggagacggtggcaatggcattgcaggagcaggaggcggacggcgacgagggcggggaggaagacgacgaaggcgaggatgagcggatgacgggatacggtgtgggggagctgatatctgcttgtcccgaggcgtgctgtccgcttgcggcggtgtaggagtaagatattggcgcaataggctcaatcatttttttttttgcttctctctttctctttttcccttttcttccttgtttgatgtggcgtgcttgtttttttttttgttgcctttttttgtttctgattgatgagaccaatgttgattatatgatgaagagttgattggtaagaacgctaaggggcctctaagatggacaatataaggtataaaggctcgttaacatagatttatatacgcgctaggtttgagaggcttaacctcgtggcgttttatcgaacacgccttgttgattcggcaaggaacacgggtgggacgctgctgtttgctgatgtggtgttggtcggccaagaaatgtgatgaacacgggtaagacgccgctgtagcattgactgaaacacagacgaacatgtcgaggacatgctactattttgttacgatcttagtatactgtatacccgt

SEQ ID NO: 2310 - DNA, 1396 bp, Zea mays
caatcataaatgcacccgccgtttgcgatgcgacggacgacgacgcggccggaggcgaggcccgcgaccgaggcgaagcgcaggaccgccggcagtcgatcgaaaggcgctctcaaaagctctgcgctgcgctggcagctttgagctttctcgggccggagaaaagccgaaacaaacaaacggactggccgagtcgaggagagagagagggtgagagggagaagagaaggcggagagagaaagcgagctgaggagcgcaggcgctgtcgctggcgaggacatgctcgcggcagcgcggtatgggctcaaaccataggcgtgtcaggaacggtggagagcggcgaccactactcgtcttcgtctcggtcctcgcgcgctcctgggctgcctcttggtgctagaaaccctcgcgtcgcgggtgcttggttgcgactgcaagcgccaagctgctgtgctgtgccgtgggtggcggcggcgggagtggaagtggaaccgcagccggtgctgtgatggacgcgcagcagcagctggatttggtcatgcgtcaccagagcatggccaccgtctgcgagagcgaggacgcgctggggtcgtcggagtcggatcccgcgaggccggcgcgcccgcgcggcaagaggagccgcgccgccgaggtgcacaacctctccgagaagaggaggaggagcaggatcaacgagaagatgaaggcgctgcagaccctcatacccaactcgagcaagacggacaaggcttccatgcttgatgatgccattgagtacctgaagcatcttcagctccaggtgcagatgttgtctatgaggaatggcctctatctgcccccaggaaacctgtctggagcacccgagactctggcacccttagaaatgtgcgcagcacttaaccaaagtggtgccaaggcatcaaattccggcgttgtcgttctacctggaaacaaaattcctgtagctcgtcttctacttgatccaccaaaccatgatcagcggcatgaaaacccgcttgtattacaaagtgttcctagtagttcgaccgctgtagagcctcggttccttcaacagccagcacagcccaacctccaatcctttcagctggctgtacctcccgagatgatcttcgacgaggcggacatgatgctaaagcatcgcctagcttcaggtcgagaaaccacatctctaccagtaggacatgaggccaagcctggtaggcaggaagcatgcatggtaaattctgatatttctaacagaggttcactcgggaaagaagtatttatgccctacttgcataggtgagtttttttttggcacataaagagatagattaacactgtcccttgtgattttaaacattctgtgaaatcagtttggattgtttccgtgtg

SEQ ID NO: 2311 - DNA, 1692 bp, Zea mays
gcattgggcgcgattcattcccctcgtgggctcccagttcagtaaaccctacgccctgcggcacacacccatctcgccgcgccgccgcgtaaaccccacccgagcccatctcgccctcgcgcctccccgccctcgcgcaggcgcaacaatggcggccgcctcgaggggcctgctcgcgcgcctccgtgtcctctcactctccggcggcgggagcccgtggctccgcttcccgccttcccggctcttctccgcggaggccttcgtctcccattccgatgacgacgacgctgggggcgagggaggaggcgggggccggatcatcgaggcacggtccggggtgatgggccccacctcgcggcgcaccggcgtcatcggcgtcaagtgcgggatgtcggcgatgtgggacaagtggggcgccaaggtgcccatcaccgtcctctgggtcgacgacaacgttgttacccaggtcaagaccgccgagaaggagggtttcttcgccctacagcttggagcaggtcaaaagaaggaaaaacacctaacaaagcctgaagttggccactttagagcacagggagtgcctctgaaaagaaagctaagggaatttcctgtcactgaggatgcgcttcttcctgttggcacaagcatcacagttcgtcactttgttcctggacaatttgttgatgtcactggaatcacgaaggggaaaggttttgcaggtgtaatgaaaagatatggttttggtgggatgcctgcatcacatggaacatctttggcgcatcgcagtggtggctctactggtcaaagagatgctcctggaagggttttcaaaaacagaaaaatgcctggacgcatgggtggtgtgcaacgcacagtgaagaatgtatgggtctatcaaatagacccagccaggaacttactgtatctgaagggccaggttactttatttctgatgtcacagcagattttgttgaagcatagaagttgtgttctatgtatctttcgttgccctttttgcaggttcctggtcctcaaggtagctttattttcgttaaggattctatatataagaaacctgacacggctttgctcccatttcctacatacttcacgcgtgaaggtgagcctgaagacttggagcccctgattgctgatcttggtgatgttgacccattcatggcagccgattaagacaatgcacaaagttggttaattcctttttgtgttctaagcactccttgagctcgtccattccacgagattgtcaaactctcgatggatgtgagcagttcctgaatcacaagctttatccggttactggccagcctgatcaatgttgttccatgtacattacctggcaagtataccagtgctctaatggtttttagatgattgttttgattgaccgaatataacctttttctcaataagttgtacgcggagccacaagtagtatataaaatcagaatatttcactcatgagagtgtgttctggttttacgcgagctgcttatgttattgctagctgttagtttattacctgtcatttttactttctatttctaatacaaccttttctttttctaataatctttatttcaattcttctttttgtcgttttctatgtactattaacttctttcactgctcttgattactgtgtccagagctcaaacgtcatctattacgactcag

SEQ ID NO: 2312 - DNA, 2185 bp, Zea mays
atgcagacttggcggcgagcggagcggcctcaacctcctcctctccagctctcctcccatataaaacgcggaagaatctcgaagagacgcctcgtcccatcgttcctctctctctgccccgcctacgcctcgccccagacgcatcaaaccgctctcctctccctccctgcccccctcgcaaccctgaagaagcccccacacgcaaggccgcaaacgcgccgcgcaccgcaaggtcccagggagcgacacgaggcggcctcattgcagcatggctgctatggccgccgctggcggcgtcgggctccacctcattggcgctgccacggccacgctcatcgtggcggtccttgttgcggccgtgctggggcgccgccgccgggcccgggcccgggcccaggcgcctccggtggaagggaaacccgcgccggaggcaggctgcgcggtcggtgacggcgcgggtcccgacgtcgggacggacgtcatcatcgtcggcgccggagtggctggatctgcgctggcgtacacgctcggaaaggatggccgccgggtgcatgtcatcgagagggatctgacagaacctgacagaattgtgggcgagctgttgcaacctggaggttacttgaaattaattgagttaggcctccaagattgtgtggaagaaattgatgcccaacgtgtgcttggttacgcattattcaaagatggaagaaacacaaagcttgcttatcccttagagaagttccattctgatgttgctggtaggagctttcacaatgggaggtttatacagaggatgcgtcagaaagctgcgtctttgcccaatgttcaattagaacaaggaactgttacatcacttctcgaagaaaatggtactgttaaaggtgttcaatacaaaaccaagtcaggtgaagaactaaaagcttatgcgcccttgacgattgtatgtgatggctgcttttcaaatctacggcgtgccctttgctctccaaaagttgatgttccatcatgttttattgggctggtattggagaattgccaacttccacatccaaaccatggccatgttatcttggccaatccttcgccaatactattttacccaattagcagcacagaggtgcgctgtttggttgatgtcccaggtcagaaggtgccttccatagctagcggtgaaatggcaaattatctcaaaaccgtcgttgcaccccagattcctccagaaatctatgactctttcatagcggccattgataagggaagcataagaacaatgccaaacaggagcatgccagcggctccacttcctacccctggcgcacttctgatgggggatgccttcaatatgagacaccctttaactggtggaggaatgactgttgcattatccgacatcgttgtcctacgtaatcttctcaagcctctccgcaatctccacgacgcatcttccctgtgcaagtacctcgaatcgttctatacgctgcggaagccggttgcctccaccataaacacgttggccggtgctctgtacaaggtcttcagcgcctcgcctgatcaagctaggaacgagatgcgccaggcctgttttgattacttgagcctcggaggcgtcttctcgaatgggcctattgccttactctcgggtcttaatcctcggccactgagtttagttgcacacttcttcgctgtcgctatctacggtgttggtcgcttgatgctccctcttccttcgcctaaacggatgtggattggagccaggctgatttctggtgcatgcggcatcatcctcccgatcatcaaagctgaaggcgtgagacagatgttcttccctgccactgtgcccgcatattaccgggctgcgcctacgggagaataagtaaagcgagaaccgattccgggctgctgcagtgctgctgatcccaccatgatctgatggcaactgatgtgtcatggatggcatttttttcctgtgttagtggttgttaggtggtttgttgtgctgctgtcattggaatgaggaacctgtatagtgtgcccctgggtactggtcaaagttgggaaatatgttgggtcctaccgtagccatgtcgattactgccaagctgtatatgattctgtcgaactagtgaaacctctccccatctttaacgcgtatcaatcttgtttgctcccccccccgagtacagca

SEQ ID NO: 2313 - DNA, 2193 bp, Zea mays
aaaagctatcgcttatcatgctaggctaggcagctttgttgagaaggagcacgggggaagcccggcaagatcactacacgtggcatgtatgtccaaaactccaaatgccgagtagacagtggcggcggtagagagcgctgttaccttgcggggtgacgggggcaccttcttcggcgcggctgcagctgcagcatcggcggccgcgccggacgcggaggccgtgctggcgtaccgctcgggcgccgcgccgcgccgcgggaagccgcgaagtagggcgttgcggagggtgcgtcgccacgcgagtgcggtggaagatgacatcgggaacgcgaggggagaccaggcgcgggaagggcgggaggactgtgaagagcgcgaggagggcggcggcggcggcggcgctgatgctgatgctggtgcaggggctgatgagccggattcccgttcggcgtggccgcgtggggagcaagcagaagtgcagaactgcacaaggagagggcccacataaccatttctatgatattgcgcgtgtctcagtgtatcggcccagtttttcatgggctgacccggttatgtggccttgttagttttcgcctaatttcaaataacagcaatttcttagtggcccgtacactctgcagcagtgcggtgcgggcgtgcggcctccctttttttctccagttcctccggcggcggcgtgcttggcggtgcgccaggtgcccagatctccaccatcttagtcgccggcgacgagcatcaccaggttcccgatgaccatggcgcagcgcacgatgtgcctgcttcggcggtccattgggtttacagggccgcaggcacagagagccctgagtaccactgccgcgccggcggcggagggtgcagccgtggctgaagctacggcgaaggaggcgaagaggaggaggaagaatctgtttgacgtagtgcagttcctgccagagtggggcattggatacaaggttgccaagaccacctggcgtgatgtctcctatcagatcaccaagatcaacctgtacaaggatggtcggcatggaaaggcgtgggggcttcggtacaaggcaggtgtgcaagctgcagacaccccaactaggatcagcggtgttaacaaacgtgggtggaagtacataaaagaatcacagaagaaactacaagaagcccccaaagtagacgtagctgttgctgctgcctagtttgtagttacatgcatgtttgttgtaagatgattcggtaaatctttagatggctgttgccagggtgagaacagggaaccactttttttttggatcgactctatacttttttgtcgatgacgactgaacctctctgcaacatgtccagtttctcttcttttcttttccttatggaacgaacctttaccgtaatgtactgatgcagaagaactgtgttgattgtggcaatctagtttccattcaaatgcaatccttgtttcattctgagccaatgttcctaggtttcagccgttcgttttccaagttgaactattttgttcctcaccatgttcctaggttttcattctacactgcggaggcgattgactggtattctcagtcagatgatgctggacggagtcatgcctacacgttcgcaacgcaggacaagtttggtgttcagccccgcgaggaccactacatggtcgatctgggactggtgttctggtatggcaggcggtgctggttgcctgccatctttcacggcagcgaggctgtaggcactcatctaattttggaagcagcaagcgagcgaacaaacaaacataccattgtgtgtcacaaagatgtcgaaaaacaaacttgcttgtatcaaaattagctcttcatgtatactgtaccaaatatacgcaaatgaccccgcagcatagttaattacaagctaaactcataaaaggaaattccttcaacattcccattggcatcctcggtggtcggtgctgaagccgcaggcaatggtcttaagtgactgtcgtagtcaagagaggttccaggtattgcttgaacttatcttttgtcattgccccttctcgccggctatctgctacctctcggccattcttgaagaaaatcaaagtcgggagaccatagaccttgtactcttcaatcagctgcggattggcgtcgtgatcgatcttgacgatttttactcgcccgtcatattcct

SEQ ID NO: 2314 - DNA, 3663 bp, Zea mays
gcgaaggcgaagcaaagctaccaacgcatacaagagtgagagcagggagcacgagcgctctgagtgagtggaagacgagaggagttggagtcccccagggctagggtttcattcgccacccgcgccgcccttcccttccccagcatccgtccgccatggtgaggaagaaaagaactggccctggagagagttctggggagtcttctggagcgcctggtcatggctcctcacagcgtcctcaggcaacacaacagggtacccgtggtggagggcaacaccagggccgtggtggatatctgggccctggagtgccgccttcacagcacccaggtggtggcccacctgagtatcatcaaccgcttgactaccagggacgtggtggatatcagggccgtggtggaccaccttcacagcatcctggtggtgggacaccccctgggtctcaaccgcgtggctaccaggggcacggcggataccagggccgtggcgggccaccttcacagtatcctggtggtgggacaccccctgggtctcaaccacgtgactaccacggacgtggtggtccacgtcccagagggggaatgccacagtcataccgtggcgggcatgtgggaggtagtgttataccaagtgttccttcaggtccatctaggccagttcccgagctgcaccaagccccagatgtccaacatcaagcccctgtggtggcaacaccatcttcgccaggagctggctcgtcctcgcagcctgggaaggctgaggtgagcactggacaagtccagcaacagttccagcaacttgcgattcataaccaaagctcagccagccaagctagtcagatagcaccagcgtcaagcaaatctgttaggttcccattgcgccctggcaagggtacgcatgggtccaggtgcattgggaaggcaaatcatttctttgctgagctgcctaataaagaccttcaccaatacgatgtatcaataacacctgaggttacttcacgcggcgtcaatcgtgctgtcatggcagagctagtaaaactttacagacactcccatttggatgggcgtctgcctgcatatgatggaaggaagagtctttatacagctggagcgttgccatttgcttcgaagacattcgaaattactctgcaagatgaggaagacagtcttggtggaggccaaaggcgccagagggtatttcgggtgaccatcaaatttgctgctcgcgctgatctccaccatctggctatgtttcttgctgggaggcagccagatgcccctcaagaggctcttcaagtacttgacatcgtgctacgtgaaatgcctactgccaagtattgtcctgttggtagatcattttattctcccaagttagggagacctcagcaacttggtgaaggtttggaaacttggcgtggtttctaccaaagcataaggcccacacagatgggtctttctctgaatattgatatgtcctctactgcattttttgaggccctccctgtaattgattttgtttctcagcttcttaatagagatatctcagttagaccattgtctgattctgatcgcgtgaagattaaaaaagccctacgaggtgtgaaagtggaggtcacacaccgtggaaacatgcgtaggaaatatcggatatctggccttactccacaagcaacaagggagttatcattccctattgatgatcgtggtactgttaagactgtggtgcaatacttcctggagacttatggtttcagtattcagcacaccactttaccttgtttgcaagtgggcaatcagcaaagaccaaattatctgcctatggaggtctgtaagatagttgaggggcagcgctactcaaaacgacttaatgataaacagatcactgctctactgaaggtgacttgccaacgtccccaagcacgtgagaaggacatcttggagactgtgtatcacaatgcctactccaaggatccttatgcccaggaatttggtataacgattgatgagcgtcttgcatcggttgaagctcgtgttctgcctcccccaaggctgaaataccatgatagtggcagagaaagggatgtattgccaaaaattggccagtggaacatgatgaataagaaaatggtcaatggtggtagagttagcagctgggcatgcattaacttctcacggaatgtgcaagatggtgctgccgggagtttctgtcatgaattggctttgatgtgccaagtatcaggaatggattttgtacttgaacctgtgctgtcaccttgctatgcaaggcctgaacttgttgaaagagcactaaagggacgctatcaagatgcgatgaacatactcgggcctcagggccgagaactcgacttgctgattgttatactgcctgacaataatggttctctttacggggatgtcaaaaggatctgtgagactaatcttggattggtctcccaatgctgtctgactaaacatgttttcaaggtgaacaagcagcagtatcttgcaaatgttgccctgaaaataaatgtgaaggttgggggaaggaatactgtgcttgttgatgctttggcaaggagaatcccccttgtcagtgacatagcgactattatctttggtgctgatgtgacccatccccatcctggggaagattctagtccttccattgcagctgtggttgcttctcaagactggcctgaggttacaaagtatgcaggattggtgagtgctcaagcccatcgtcaagaattgatacaggatcttttcaaggtatggcaagatcccgaaagggggactgtctctggtggcatgatcagggagcttctcatatctttctggagggcaactggacagaaaccaaagaggatcatattctacagggatggcgtcagtgagggacaattctaccaagttctgttgtatgaacttgatgccattagaaaggcctgtgcgtcattggagtctgactaccagcctccagttacttttgtcgtggtccagaagcgtcatcacaccaggttgtttgctaataatcacaatgataatcgtgctgtcgataaaagcgggaacatactgcctggcaccgtggtggactcgaagatctgccatccaactgagtttgatttctacctgtgcagccatgctggcattcagggaacaagccgccctgcccattaccatgttctgtgggatgagaacaactttacggctgatgggttgcaaactctcaccaacaacttgtgttacacgtatgctaggtgcacacgctcagtatcgattgttcctcctgcatactatgctcacctggcagccttccgagctcggttctacatggagccagatacgagtgacagtggatctatggcaagccgtggccctccaccaggggggcgcaacaccaaggctgccggtgttgggaatgttgctgtgaggccattacctgccctcaaggaaaacgtgaagcgggtcatgttctactgctaagactgatgctgttaaggcagagctaccttttattattacagtatatcgtgaagactagagtattttttttccatgtacttgatgatgctgagctaccttttattatgtcgtacgatatatatgcgtggtattgtatactggttacagtaactttaaaaaaaaaaaaaaaaaaaaaaaaaaa

SEQ ID NO: 2315 - DNA, 2572 bp, Zea mays
tacgacgccgcactgcctgcctgagtgcctgggtggagcggaggtggtgggataatggattggggaggcctttttatagaccggtaggcatgatgctcttctcattactgacaagcgccagagcagagagggagagagagaacacacaaggggaggggtggggaagggaagggaagggaggcgcactcgtcccgtctggtatcgtctcccccggcagtgaaggagtagaaggaaggagagtaggagtaggaggggagaatgcgtgtcggcggcgggcgggacgacgacgacgaggtgtcccggaagctcaagagcatggacgtggacaagctggagaacggcggcggggaggagagcccgcggcccgccgtcaagtaccacggctggaaggccatgccgttcatcatcgggaacgagacgttcgagaagctggggacgctgggcacgtcggcgaacctgctggtgtacctgacgcaggtgttccacatgcggagcgtggacgcggcgacgctgctcaacgggctcaacggcaccaccagcctcgcccccatcatcggcgccttcctctccgacgcctacctcggccgctacctcgcgctcgccatcgcctccgtcgcctccctcatcggcatgttcctgctgacgatgacggccggcgcgaatagcctgcacccgccggagtgcagcgtgggcgagacctgcgagaaggcgacgtcgtaccagttcgcggtgctcttcgtggccttcgcgttcctggtgctgggctcggcggggatccgcccctgcagcatgcccttcggcgccgaccagttcgaccccaacacggagtctggcaagcgcggcatcaacagcttcttcaactggtactacttcaccttcacggccgccatgatgatctccgccaccgtcatcatctacgtgcagagcaacgtgagctggcccatcgggctgggcatccccacggcactcatgttcctggcatgcgtgctcttcttcatgggcacgcgcctatacgtgcgggtgacgcccgaggggagccccttcaccagcgtcgtgcaggtgctatcagccgcgctcaagaagcggtcgctgaagcagcccaaggacccgaagcaggacctcttcgacccgccgcacaccagcgccatcgtcaccaagttggcgcacacggaccagttccgctgcctcgacaaggcggccatcgtggcatccccggacgaggtgcgttccggcggcggcgcgcccgcggacccctggaggctctgcagcgtgcagcaggtggaggaggtcaagtgcctcatccgcatcgtgcccgtctggtccacggggatcatctactacgtcgccgtggtgcagcagtccacgtacgtggtgctctcggcgctgcagtccgaccgccacctcggccgcgccggcttccagatccccgccgcgtccttcaccgtcttcgccatgctcgcgcagacgctgtggatccccttctacgaccgcctcctgctgcccaagctccggaagataacgggcaaggaggaggggttcacgctgctccagcgccagggcatcggcatcgcgctctccactgtcgccatggtcatctcggccatcgtcgaggaccggcgccgtgccatcgcgctcagccagccgacgctcggcaccaccatcactggcggggcgatctcggccatgtccagcctgtggatggtgccacagctcatgatcctggggctgtcggaggccttcaacctcatcagccagatcgagttctactacaaggagatcccggagcacatgcgcagcgtggccggggcgctcgccttctgcaacctggcgctcggcaactacctcagcggcttcctggttaccatcgtgcaccggacgacggggtccgggcagaactggctggcgcaggacctcaacaagggccgcctcgacctattctactggaccatcgccggaatcggcgtctttaacttcatctacttcgtcatctgcgccaggtggtacaggttcaagggggccagcaactgatccgccgaggtaaccgtcgtctcacgatcacgacgagtgcgggcatgaatgggactcagctctatgcggtcctgatggcagtttgcttggtggcttgggtaattatgttatggccttggcagagcaacaggaaaaaaaaggggccttaaaataaggtcatgataattattttgtatctaccatagtagttgtttgatatcgacgcctctctctctctctctctctctctctctctctctctgttattactttatatttttgttactgtcctttcatttgaatctataggatggtcaaagtggctgatgaaagaggagaaagaaacaaaacagttggtttcttgttacttgtaagtggttaaactgaaatacaaatggatgtaagattgaatgaaagctttagctcagttaccagattatgattgcaagcatttactccttgacatgccttcacacttcgttgacgcggaactggataaacgaatgccttcaaagttcacttccggttggtcacttggtcttcatgccgtacctggtcatcgtcc

SEQ ID NO: 2316 - DNA, 1129 bp, Zea mays
accgtcgccgatgcgagtagcagtcgtaggcgcccgtgccggcggatactcgtcctacacccagtgcacagtgcacgcactccgcataccggcagtgccactgtgccagccagccagccgctctgcttgtcctccagacagtccaggagtgaccgccagcccctgcactgcacacacaccctccctcattcacccccccccccccccccccccccaatcgcctccgaatctctctgcctcattctctctccaccggcgacggcgagtccgaccgcactgctcctctccgtgcggagatctctcgcgtgctggcaggcgcgtcctggtgactgggacacgggagaagagaccttggtgggtggcagcggcaggccatggaggcgctgctggtgacggtgcttcttctcctcctctcctctaccctcgccgcagcacaatggtgcgtgtgcaggcaggacgcgtcgcaggccgcgctgcagaagaccatcgactacgcgtgcggctccggggcggactgcaactccatccatgagaccggggcgtgctacaaccccaacaccgtcccggcgcactgctcctgggccgccaacagctactaccagaacaacaaggccaagggcgccacctgcgacttcgccggcaccgccaccctcaccaccagcgacccgagctcttcgggctgctcttaccccaccaccagtgcaagcgccgcgggaaccgtgaccccgaccaccggcggcacaatgggaggagcgggaggcccagggaccttgacgcccgccgggacaggcgcaggcacagccggcactaccggcatggggactgcaggcactacgggtaccgggttcggcggcctaggaccagcaggcatggacacagcggcggcggcggcggggggcttgctcctcctcccagaggctgggctgtgcgctgccctcgtcgcgctcctcctctccgccatcgtgctcgcgtgacgccttcacatgacctcggaaacaacaacctactgcctgcatgctagtagtagtagaaagcgctgcccttttgggaggtgtatgtagttcaggagtactctgattatctatggagaaagggtgggaattattggggaaaaaaactaatgcatccc

SEQ ID NO: 2317 - DNA, 3187 bp, Zea mays
gtagtctttaattttatatatatgatcgagctgcagatgagaagctgcacgcgatgccccagcaagcagtattagttgggttgacggcgggcatggtggcggcggaggggaaggcagctgggaacaagacgatgatgcagaagcagcaggcgagcagctgctgctcggaccgtgaccaggacatggcggacctggagctggcgcttgaggcggttgttccggtgagcgtgcagcggcaggactcgctgtacagggacgcgacgagggcgggcggcggcgggcagcagcagcacgaagggtgggctcggactctgaggctggccttccagtgcgtgggcgtcctctacggcgacatcgggacgtcgccgctgtacgtctactcgagcaccttcgccggcggcatccgggacaccgacgacctcctgggcgtgctctccctcatcatctacagcttcctcctcttcaccatcatcaagtacgtctacatcgcgctcagagcaaacgacgacggggacggcggcacgttggcgctctactcgctcatctctcgccacgccaaggtgagcctggtgcccaaccaccagcccgaggacgagctgcagacgacggacgccgccgccgccgtgctgggcaagcacgggagcgtgcggcgccggaccgtgcagctggcggcgtcgcacgggcgggagcagcgggcggtgtgggtgaaggagctgctagagacgagcaagcccgtgcgcatctccctcttcttcctgaccatcgtggccaccgccatggtcatcagcgacgcctgcctcacgcccgccatctccgtcctctccgccgtaggggggctcaaggagaaagcgccaaacctcaccacaggtacggccggtgcgaggccgagggtacgtacaccagatcgtgtggatcactgtgggcatcctggtgcttctgttcgccgtgcagcgcttcggcacccacaaggtgggctacctgttcgcccccgtctcctcctgtggctgctcctcatcggcggcgtgggcgtgtacaacctgctcaggcacgacgtcaccgtcctccgcgccttcaaccccaagtacatcctggactacttccggcgcaacggcagggacgcctgggtctccctcggcggcgtcctcctctgcttcaccggcaccgaggcgctgttcgccgacctcggctacttcagcatccgctccatccagctcagcttcggcttcggcctcgtccccgccgtgctgctcgcctacatcggccaggccgccttcctccgccggtacccggagcaggtgtccaacgccttctaccagtccacgcccgagtccatcttctggcccaccttcgtgctggcgctggcggcgtcggtcatcggcagccaggccatgatctcctgcgccttcgccaccatctcccactcgcaggcgctgggctgcttcccgagggtcaaggtgctccacacgtcgcgccagtaccggggccagctctacatcccggaggtgaacttgctgctcgccctcgtcgcctgcgtcgtcacgctcgcgtccaagaccacggccgtcatcgccgaggcgcacggcatctgcgtcgtcctcgtcatgctcatcaccacgctgctgctcaccctggtcatgctcctggtgtggcgcgtcaacgccgcctgcgtcgcgctcttcttcgccgtcttcgccgccgccgagtccgtctacctctcctccgtgctctaccggttcgcgcacggcgggtacatccccgtcgccatgtccgcggtgctggtggccgtcatggtgctgtggcactacgtgcacgtgaagcggtacaagtacgagctggagcgcacggtgtcgcacgagagcgtggtgcgggacctgctgccgcgctgccgcaccgtccccggcgtcggcctcttctacacggacctggtgcagggcatcccgcccgtgttcccgcacctggtggacaagatcccgtccatccacgccgtcctgctcttcgtctccgtcaagcacctgccggtgccgcacgtggacgcaacggagcgcttcctcttcaggcaggtggcatcgtcgtcggagtcggacacagctgcaggcccacgggtgttccggtgcgtggcgcgctacggctaccgggacctgctggaggaggccagtgacttcgcgggcagcctggtggagcgcctccagtactacatccgcgacgtcaacctctacggcgtggagcaccagcagccgggcgccaaggtgagctacccgagctcgcgctgcgacagcatgatattgatggcgcggcagaggtcgtcggtcatgatgctgcggcagtcgtcggcggcatcctactactcgtcgtacgcagcggcagcggagacccagcagctgcagctggcgagggccaggtccacgtccggggcggggggcatcctcctccactcggcgtcggagagggccgagcagctggcccgcgccaggtccacgggcatcttcgcggaggagatgctgacgccggcggagtcgttctcggagctgtcgaggatggggagcatcggcggcggaggaatgcaggcggtgaagatcagcctggaggagatggcgcggatcgaggaggagcagcggtttatcgagcgggagatggaaaagggggtggtgtacatcctcggggagagcgaggtggtggcgcggccccactcgtcgctgctcaagaagctgctcgtcaactacgcctacgccttcctgcggaacaactgccggcagggggagaagatgctcgccatccccaagtcgcagctgctcaaggtcggcatgtcctacgagatctgatctgatctgattctgatggcgcgcgcgtcaccgatcgatctcccagctccatcatgccgtcgtcctcattatatatatatgacccagactccatatagtatagtacactactagtcttcagacagatttgatttcgtatgctttctctgcagtgatgctactagctacctagctagctagtacaattaattgtggcacacttgttagctgctgcagtagcataattattaagtaatttgcttctcatctactctactctactctactctactcttccagcagttcatggatgagggacatatctggtgcacatagaagactggtgcacatggtgcatatattaaatcatcaccacttattttagatct

SEQ ID NO: 2318 - DNA, 2947 bp, Zea mays
cgggcggtgtgtccgcgtgtggtggtggcctcagcgattttgctgccccccatctcctttttttagcacatcgcttgcgttctctctctggtttcctcctctgctctgcgctccgcttcccaccgctcctcccctgccgtctctcctaccacaaagccgtggcccgtgggcgctgttcgcggcggcgacgggtctctcatctcctctaccctctctcgcgcgcaacggcctaaaaaaaccctagcgactcggtcggcgctcgacttggatcgtgccggggggctaggggcaggggcagctctcttctctcgtcgtcgtccaggacattgttgataacttgatactggattttcttccttctcgaacctgtagagggctctgctttatttgcagattagaccttatatggtttgagtgccacaactgaaactttgcacctaaaacccgaggccaagttcactactttattatatccttccatacacagaaagtggagagacatggatcgtgatgatatagctggtttcgtcagtggaggttgctatgagtcctgaatttctaacccagtatatataacagagttatgatatccagaaggcagacaattgtttcttttcgttttctagttggtttgcatttgatgtttcataattggaatggatacaactactcaaggccttgagtttggtggtggtatcaactctccgaagccatattgctattggagcacaactcaagacactactgtgcacaaagatagtacaccagaggcatattccaccttttctatttccaactcaaaagcgtcaaaaaggaagcaaggtgccatgtctggagcaaaaggtggaaaccctttactcactttgggtctaggctgctcaccaagttcatcttataacagcaagctaagttctggcactgcttgcataacatcatcatctttattaaaggagattgatgaagagtcttcaatagatcttggccttaaccttgggttgtatattggaaatgatattggacactgccaacagaaatcccatgctggttttgaaaatgtgctctcgacaaactctcctaaactggatcttcagttgagtttgtctaccagttcgcctgaatcagttgtcattgatgcaaataggtcaccagatggcttggcgatgccgatggccaattcaccactcgccattgtagaagaaggatcagtaccacatagttgggttttcgagcattcaattgtttcatcatcacatgcttctaaggcaacgcatggctttccattatcaaagaaaaccaatggaggcaatgcctctgtgccttctcatgtcatgtcatcaactatgtttacaagtgtgaaaggtccagttgcctctgcttctgagacaactaactcccaacaacgcaacagtaacgctaaaagctgtcagtttccaggatgtgtgaaaggagcaagaggggcatcagggcgttgcatagcacatggcggcggtaggcgttgccagaaacctggttgtgagaagggcgctgaagggaggacaatctattgcaaggcccatggtggaggcaggagatgtcaatttctcgggtgtacaaagagtgctgaagggcgcacagaccactgcatagctcatggtggtggccgccgctgcagccatgaaggttgctcccgagctgctcgtggaaaatctggcctgtgtatcaagcatggtggtggcaaaaggtgtcagaaggagaactgtaccaaaagtgcagaaggccattctggactctgcattgcccatggtggtggaaggcggtgccagtttccagactgcacaaagggtgctcagggaagcacaaagttctgcaaggcacatggtggaggaaagcgctgcacattcgtcggatgcaccagaggggctgaaggcagcacttcattttgtaagggccatggtggaggcaagcgctgtgcctttcagggcggtggcgtgtgcccaaagagcgtgcatggtggcactcagtattgtgttgcacatggtggtgggaaaaggtgtgctagctttggttgcactaagagtgctagagggcgcacagagtattgtgtgcgccatggaggtggcaagaggtgcaagttcgagagctgcaccaagagtgcgcaggggagcactgatttctgtaaggctcatgggggaggtacacgatgcctgtggggccaggcggacacaagctttggtgctggtgcacagcaatgcgataaatttgttcggagcaagaccggtctctgctcagctcatagtgctttgatccaggaccactgtgttcatggcggtggtacattaggttccgctatctaccagtctgtgcatgtcaaaccgactgagatgatcaatggtgataaaactttactggatccggctatccctgttacaaacagtggtgttcatcctcctgtcctagctcagtctatgatcgatccgctgccagagggcagagttcatggtggtggcctgttggctttactttcgcggggcggaagcagaacaagcgctggtggctcagaattgtgcttcgggcaagatcgtgtggatctgaggctatcaggatctccatgaaactgatgactgcctgcagttttgatccaaattgtgttgctcatgctcgggttccataggatctacccggacgtgtactgtgaatctacccagacgtgtactatgaaaataagagggtagctcctagagcagatgtgttgttttattttagttaattgtttcagtgcatgtaatcacttactttaatgctcatgtttggacttgattaactctcagcaacttaaggttgaaatataatgtgcattttgctgcttattctgctgagtatagtaatttcataaaagcacttcatacgttgtcatgtatactaatactagaaaaatgagaataagctacagacttggatgctagaatcc

SEQ ID NO: 2319 - DNA, 2394 bp, Zea mays
ttctttttgcatgattaattcattcctctcctcctcttgtttactacgtacggtacgtatctctcgcaaaccggccaaacctctcatcagttaatcatcaaccgaccaatcatcaaggcgcattggtctttaattcctatattcctatcgctgctgctactccagtctccagcagatagatagatcccccgtccatcggcaatcaagcacaacacaatgattaaatgagagcctggttaatttgatacccatggtttccaatcaattccaacaataattcattcattcgcccactgccacacagcgagcgcgctctcaggctgggctgtacgtatataggtcgcccacaggcagcccagtgactccactccacccacgcctccaccacagagagccgcagcagactcgcaagggggtagtgttgtgtactctgcgctgtgcggacggcggccggcggccggcgaaggagatggatcgcctgcccgagtcgacccggagcatgaggaagtacgcgtcggaggccggcgggctgcgcgcggcgcggcagggcccccacgggcggtcgctgacggcgcgcacggcgcacagcatgtccacgacggcgctgcgcaccaagtccaagtcggccgcgtcgctgctgcgcagggtgcccttcgcgccgctccgccccgtcctcgccaacctgcaggaggtgttcctcggcaccaagctcgccgtgctattccccgccgtgccgctcgccatcgccgcccagtgcgcgcacttcggccaggtaatcgatcaatcaatcccttactccagccacatcgatccactggatcaaaacagaccagcagcatgtggcgccttgctcctcgcatttattcgtcctatcctgcacgccgtggggtctctctgtagcctgcggaccacatgcgatccattcgtgttaaaacccggtcgaaatttgaattggaactgcctcgctcactcactgtcactggcatggcaggtgtgggtgttttcgctcagcctactcggcctcatccccctcgccgagcgtgtcagcttcctcaccgagcagatcgcgatatacaccggccccaccgtgggcggcctcctcaacgcgacgtgcggcaacgccacggagctcatcatcgcgctcttcgcgctcatggagggccagatcgaggtcgtcaagtgctccctcctcggctccgtcctctccaacctgctgctcgtgctcggcacgtccctcttctgcggcggcgtcgtcaacctcggctccgaccagccgtacgacaggacccaagcggacgtcagcacgggcctcctcatcctcggcgtgctgtgccagtcgctgccgctcatgctgcgctacgcggtgggcgccggcgagcactccgtcgccgcggccaccacggtgctcgacctctcccgcgcctgcagcgtcgtcatgctgctcgcctacgtcgcctacctcttcttccagctcaagacgcacgcgcagctgttcgagccgcaggaggtggacgacggctgcgaggcggaagaggacgagcaggccgtcatcggcttcgccagcggactcttctggctcgccttcaacaccgtgctcatcgccatcctgtccgagtacgtggtcggcaccatcgagcctacctccaagtcctggggtttgtccgtcagcttcatcagcatcatacttctacccatcgtggggaacgccgcggagcacgccggagcaatcatttttgctctcaagaacaagctggacattaccctcggagtagcgttggggtcggcgacccagatctccatgtttgtggtgccgctgagtgtcattgtagcttggatcgcgggtattcaaatggatcttgacttcaagctcatagagaccggctctctcttcgtctcagtaatagtgacagcattcaccctccaggatggttcgtcacactacctcaaggggatccttctgctgctgtgctacattgtgatcggtgcatgcttctttgttacgaggcaacctgcaagtaacaacaatggcgctgggctgtcgctgccaactggcactttgagtgcacaagctgcatgatggttcaagggtcctgcctgagcctgaacaaatgagcatccaaggcagcaacgcagttgtgagtctgaaacaatgccgtgcaaaggttgatgctttcagaagcggtgaaatctcagccggtggctcagtgctatgggagaaatgaaggctagctgctgttgcaataagggtagcgaatttgcatccggtctatgtatatgatgctgtgttgtttcatttattatacagcttaataagatatatgcagagggtggatttgtatatatttgtggcttgccggcttgtgcggttgtacaagaggattcccagcttgtttc

SEQ ID NO: 2320 - DNA, 4222 bp, Zea mays
atgccagcagcggcacctactactccaaggaggcacccgtcaccgaatgccggcggtcgggcgtcgtccccgacgccagctgggtcacaggcgaagaggtcccagtccaccgaacggcggccggtgactccgtcaaggccgtcttccggcggctcgcggccgagtactccgtccaggatctctgccccggcatcgccatcgtctgcgacttccagcccgtcctcattctctagctcgtcgacgccagtgggtgatgccgttccagaaacgcaaatcgctctgaggaggttgcctggtggccgggctcctgatgggctgtggccttcaatgcggagtctgtcttcttctttccagctcgaatcaaaggggaaaaagatttctagtagctcctctgcagatcaggccaagacgagggatgcagcacccgctgataggaagaggagcccattgagaggtagagctacccctgagcaatcggagaatccacatgccaaggtgattgatcatcatcgctggcctgctatgatggggggcagggtgtctgcaagcacaatgtccaagagcatggatctcactgataagatcagtaggtctgctcttccatcagttccgtcacgtggtgtttcaccgaagcgaacaacagtgtcctctgctgcaaataccttgtcaagaagtattgatcttgctgataaaattgatcggctggtctcttcgtcaatgtcatcacaaggggaatcaccaagaaagtcaccttgtaatggtgcagatgatgtgtccaaaaaggttggtgttcgtaaagatctcaaactctcatccttggcaatatcaagaagggtgtcaccagtaacaacagatgataaaattgatcggctggtctcttcgtcaatgtcatcacaagggggatcaccaagaaagtcaccttgtaacggtgcagatgatgtgtccaaaaaggtcggtgttcgtaaagatctcaaactctcatccttggcaatatcaagaagggtgtcaccaataacaacagctgcatcagatggcactagaaccttatcaggaagcatggatcttactgaaaaagataacagtacactctcgccagtttcatcacccagcatttcaccaagtgcatcattatcaagtgtgtctaatgccgcatcacagactactacaaagtcatccgagagattaattggacctgtttccaacctgtcctcatcgagaggactttcacctagaagaacaacttctggtggcattgttgatttaatgaaaagcattgatttccctgaaaaagataggagaccagcttcatcaagagggttttcgccaaggaggagactcgtgtctgatggtgttaatgatattgggaaaaatatggattttgctgaaaaggatagcagagtagtcagctcatcaattccatctcgaggggtttctccaaggagaagacttgcctctgatggtgttgatactatgtgcaggagctcggagttttctggaaaggataacaggccatccacctcatcttccacatcacgtggaatgtctccccgaagaaggcttgcttctgatggcataagtgctgtaaccaaaggcatggactttggtgataatgctaacagaccatcaacctctaaaggagtgtcacgagggatttcaccaagacttcaattagcctctgatggtgttggcaatgtatcaaaaggcacagatcttgctgatggactggacaggccatcaacctcatatgcaacaccgcgagctgcagctcgaggggtttcaccaagaagacggctcgcctcagatggtgtcaaagtgacatcaaagagcattgatcttgttgaaaacagtaacaaacccttaacagtgtcagctgcaacacgaggggcttcaccaagaagacggctcacctctgatggtctagcatttatatcaaagagcacaaatattactgaaaaaagtatcagaccttcaacaccgtcaatgtcatcacgagggatgtcaccaagaagacggctggcctctgatggtatcaatgctgtattggacacagaatttgctgacaaaaattgtagaccatcttcctcatcagctgctttacgaggggtttctcccagaagcaggtctgcctctaatgccatatcaacaggcatgactaatgctgaaaatgacagcagaccatccacaacatcaagtccgtcatgtcagactctgcagagcagcaggcttgaatctaatggtgttaacatcctatcaaaagatatggaaatctcatcaactgtatctggttgcacttcagacagtagacttgatggcgctggtgctctagtaaaaagcatagatgtcactgagaaacttactgtgtcaactgaagatggtggtggtgaagacgatcctggaagaatagattctagtgacgtagttactagtgcagtttcatcatcccttgcatctcaagaggtatcatcaagacatgttactgatgacgttaagaatgcgtcagagagtgttggtgcaacgcaaaaaggtaacagaccattatcagtgaaggttccatctcgagtagcttctccaagaagacgacttgcatccgatggcattgatactatatctaaaagcatggattttgctgagaaagataagaaacccatgacagtgtcagttccatcacgtggaatgtcaccaagaagaacagcaagatctgacagtgctgatataatgtcaaaaagtatggattttcctttacaagtgttttctacaagaagagtactaggacctgatggtgctaatgccatgtcaagaagcatggatctaactgataaaattagacagaaaatatcttcaactatgcaatcatccagagtctcaccaaggaaaatgcctcttgcttataacagaataaaaggccctgaaattttatcaggtgatgctgagagccctggttctgctgatggaaatgaaagtcaagaggagaatgccagttcaagtccagatgcaccttcaaatagttcagaaaaatctacacctccaaagcagctagctaggagatcaccttcgccatcacatattttaatatgcccttcatcatcatccaatgcttcatcgacaccatcatttgtctccaggagattaccaagcccatcaaggactagaccttcaacacctgtctcaccatgtagttctgccagatctgattcagcctcttcaattcttagctacattggtgatgctacaagagggaagaagagcccaactcacacggaagatgcccatcagttgcgcctcctgcataataggaacttacaatggtgttttaccacttcttatgttgatgaactgctgtcaattcagaagataagtgctgagactatgttgtatagtgtatgggatgctaactcaaggatgtgtgactctatggttataaaaaggaactatgtacaacagctaaggcaagaggtcaaattgggaattgtcttgaaggagcaaatggattaccttgatcactgggcagcgctgcaaacagagcattcttcttctttatccagcgcaactgaagctcttaaagcaagcacattgcgtcttccagtttcaggaggagctaaggccgatgtacttactgttaagaatgctgtcagttcagcagttgacattatgcaagcaatggggtcatccgtttgccatttgctatcaaagttacaggcttcacactctctggttacagaactttcagctgttgctgctaaagaaagtaccttactcaacgagtacagagaactcttggcaacagcagcagcactacaggtccaagagtcgagcctaaggacacagctcatacaagaaacagagtgaacaggttaaggtcctgtatttctaactaggaagatagaagtaaacaccattcgttagtttcagtgactgctgcatatgtgtacctttgatgtcgttttgtttttcctttgctcttccttttcccccccacttattagctagctcatatttctttacatttctactcccccccccccccctgttcttttctgttcgaacaacttacatggaagataagggaagcaacatggaaatggaatcatggatttactccatgacaaagctgccaatgtggtcttttattgcatcctagaccaatgagccaaaaactgaaagctttgttgtaagctgtaaatctgagcagttatgtgtccttcagtgtaatgcctttggatgt

SEQ ID NO: 2321 - DNA, 1463 bp, Zea mays
cctttccctcttctcttccaacgccactcagttctcttccctctctgcgcaccaagaagaggtgtcttgccagaagggagccgcctcgccgcagccgaaggccacccatgcagccgagcggccgcgaaatgcagggcggaggcggggcccaggacgacttcttcgaccagatgctgtccacgctgccggccgcgtggtccgaccttggctccggcaagtcgccctgggagctccccgcggcggcgggggccgtgaccgaggacaccgccgcgctcgacgagcctgcgctcctcgcgtcgcgcctccgccaccaccagatcggcggcggggagaagcccctcatgctccacctcagcgacctgcacggcctcggcgccggcgccggcgacgacgcggggttcatgccgctaccgctgttcacccagcacctcgccagggacgacgtggatgccgccttcaagtcccccaatgccgccggaggcgaccgggagctgtacaacgggttcggagccgctgggaatatgcacaccgccgccgtgcatcagccgccgccgttcgggcagggcgggtcaatgccggcggcgccgcagagcttcgggggtggcgggccggcgccggccgccggagcggcgtcgggcggaggagcgccgccgcggcagcagcggcagcgagccaagagggggcaagccactgaccctcacagcatcgccgaacgtctacggagggagaggatagcggagaggatgaaggcgttgcaggagctggtccctaacgccaacaagaccgacaaggcatcgatgcttgacgagatcattgactacgtgaagttcctccagctccaagtcaaggttctcagcatgagccggctaggcggagcgacagccgtcggcactctagttgccggcatcgcatcagagggcaacgggagcggagatggcacgagcgacagcggaaaagggaacgccgccaacggcgagaacggcggtggtggcagcctgcaggtgacggagcagcaggtggccaggttgatggaggaggacatgggcaccgccatgcagtacctgcagggcaaggggctctgcctgatgcccatctctctcgcctccgccatctcctccgccacgtggccgtccctcctatcccgcccctccatgggcgcaatgggagacgctagaggtcccctgcacgacggcggcagccctgcgtcgccgccactggtgaattgtggtgatgattccagcaccgtcaaggatgccggtgccggcggtaagcggtgaaggcaatgatcttgtcttgagaggttgcgtgtgaaagatcaacatgtccaagtgaaaaatgaaatgaattgggctaaaagttctggcaacaattaaatcttatcaaattgtatatttcactctttattattcaataggctacttcacttcttatgtctaataatattttctatcttatgtacaaaa

SEQ ID NO: 2322 - DNA, 1945 bp, Zea mays
cctccattccacttgctcccaaacaagccctaatggtctagttgccctcgtcattgaggaacacatgactgaatgaaacagagcataactcaggtggctgagggtgtagatgtatgcccagaccacccgaggcgaatttgggtgcctattttcttattatagatccacctagttccttctaggttggtctaggtccccccccccccccccccccattccacccaccatactgaacagaaacaaaacataacttgcatgaagtttaatgtcaccagaagcctagagcttagtcctaattatttcacctgaagtttgcaacatactgtattcgctacccaacaaacatgtctgaaaagcgatgaggacatgtagtttagctgcgcgttttcttgttgcaggtatgagcgtttcctcaaaataatgattttgagtgttctaaaaaagacacagaggccagtgaagttttggttcattaagaattatctatctccacagttcaaggatgtcataccgcacatggctcgggaatatgaattcgagtatgagctcgtcacatataaatggccaacatggttacacaagcagaaagagaagcaaaggattatatgggcatataagatcttatttctggatgtcatttttccactttcactgaggaaggtgatttttgttgatgctgatcaaattgtgagagcagacatgggagaattgtatgacatgaacctgaagggtcgcccgcttgcatatactccattctgtgataacaacaaggatatggatggttttcgattttggaagcaaggtttttggaaagatcatctgcgaggaagaccgtaccatatcagtgcgctttatgttgttgatttggccaaatttcggcaaactgcttctggggatactcttcgtgtcttctatgaacaactcagcaaggaccccaatagtctctccaatcttgatcaggatctcccgaattatgcccaacatacggtgcctatattctctcttcctcaagaatggctgtggtgtgaatcttggtgtggaaatgccacaaaagcaagagcaaagaccattgatctatgcaacaatccaatgacaaaggagccaaagcttcagggtgctagaagaatagttccggagtggactggtcttgacagtgaagcacggcagttcactgcacgaatcttgggtgatgatgtcgagcctgcagatgccacacctccgccatcggaggcaccgaagcctgaagatgatcaggatgtgaaagatgagctatgatcgcaagatgtttccaggcttggtcttactgaatgaaagtttggtgactcgacagtcatcagttcagaacacaggcacacagctagtggagcgcagagggatagtttaacgcaggtgcaaatttgtcaaaacactacacctggaatcctagactacgttgattcaggtatttcgtttacagtaaggccttgttcgtttgtgtcggattggtgggtcggaatgatttctagccgggttgcttttctaatttatataaactttaattagctggaataattccgggtgcaatccgatgtaaacgaacaaggtctaatagtttcaagacctttaaccaaatcatatggcggggaagctgcgtccagtaataggttaacaaggcagccagctggggtgtagaactctgtctgctctcagctgcatacacatagactgtaatggtcaacaatttaagatctccttgagacattgtaaaatttatcggctgccagtcgaaaggcaacagcgaagctggcagctgaaatgcccgagaattttgtagcactcagcaaacggattttttaaacactcagtaagtcaataatgcctgtcgcatgtaacagcaggctattgtgggcatggcagctaaccgttatactaaaaaaaaaatgccaagtgctttatcagttgggtt

SEQ ID NO: 2323 - DNA, 2607 bp, Zea mays
cccggcgtgcgatagccattcgtatccccggccccggggcggccacacccccggccccgctccgaagaatcgcagtcgcagcccgcacggccgcaccgcaccactcccgcacttccgcgcggcgcgaactcggcttatcgacaccaccacggcaccgctacagcctacagctcgagagaggaggggaaaaaaatctcagccaccaccggcagccgcgggagcttcgcgtgcgccgcttgctcactgcccgcacacgtacgccagaacccctctctcccccctccttctgcagccatgctcctccacctgcttccgctctcctgccccgcgccgccgttccacctgcgcaggaccggcggctcgccgcggacgccgcgggtccgggccggcgacaggaccaggacacgggggttccgggggacggacgtggagccggagacagctccgcgaaggcgccgcggccgcgatggcgacgatcctcaagcggctgggagcggtggagacaccggggcgctgctggcgtcggtcaggaggcttctgctctccgaggcgcctgcggcggcggagggagacagtgaggaggaggagcagggacagttccccaagcgttgggccatcgtcttcctctgcttctccgcatttctactctgcaacatggaccgcgtaaatatgagcattgctattctgcctatgtccgcagagtttggttggaacccacagactgttggtctcatccagtcatctttcttctggggctacctcctaactcagatagctggagggatatgggcagatactgttggaggaaagactgtccttggttttggtgtggtttggtggtccatagctacagctcttactcctgttgcagcacatcttggcttgccatttcttcttgttgtgcgggctttcatgggaattggtgagggggttgcaatgcctgcaatgaacaatattctttcgaaatgggttcctgtatcagagaggagcagatcattgtctcttgtgtacagtggaatgtaccttgggtcagttacaggacttgcattttcccccttgctgatacataagttcggttggccatcagtcttcttttcatttggatccctagggcttgtttggttcacgacatgggcaaccaaggcatatagttccccacttgaagatcctggaatcagcgctgcagaaaagaagcttattgctagtcagagcacagcaggcgaacctgttaaaacaattccatggagattaatactatcaaaaccacctgtttgggcacttatagtttctcatttctgccataactggggaactttcattttgctcacatggatgcccacatactacaatcaggttctgaaattcaacctcatggaatctggccttatctgtgttcttccctggttcaccatggcggtttctgcaaatgttggtggttggattgcagacacacttgtcagcagaggagtatctgtgacaactgttcgtaagatcatgcaatcaatcggattcttggggccagcattttttcttactcaactaagccatgttaattcgcctgccatggcggtgttgtgcatggcttgtagccagggaactgatgcattttcgcagtctggtctatactcaaaccatcaagatataggccctcgatatgcaggtgtactgcttggtctttccaacacggctggggtcttagcgggtgtatttggcacagcagcaacaggatacatcttgcagcatggttcttgggacaacgtattcgagttatcagtagtgctttatctggtagggactttggtatggaatgtattctcaactggcgagaagattcttgattgaagggtgtatgtacacagtatgcttacagttcgtagtgacaaactcatttcggatcgacaacttgacccctggacataatacacttcaagataacaaatgtgtcatcgcgcagcacgagaagtatcaaccttaacatcccggatattaaattgcctggttgtgatgttgctctggtagagacgatttgaagcatatggaattatggatgagttgagcgatgcacccgttccgagcatgccactgtatattgtgttgagcataggtatcatgtacagcatggtagaaagattcgtcatacagagtagttttttttttacttgtacaatttttccctcttgaatagtttgttcctgtaacagcccgacgtagataaaaacaaggaaacctggggatgggggtactactaatgcaaacatttggtgaatatttatccatttgcggactgagtctttaggggtagtttgaaaacttaaatcctatctggattcctgatgattaaggaaaaaaattaagctattttttccctcaatctcaggacatcgcggaggaaatttaagttttcaaactatatgccaaattgttacaatatctgtatcgttgtttggtatttctttaaagatgaagtgaagttcaacctcaaatgtttgagtttgaccgtaggaattgagttgcttaaagatgtagtacagttcacccaataaggggcgtttggttgcttgtatgactgagtcaggcttgtatctgtgagcttgggttcaacttgtt

SEQ ID NO: 2324 - DNA, 3203 bp, Zea mays
tgtcgtgtagtgtatctctgctagtgaggagttcagcagagcccttgccaagaacatgcgattgtttgataggaattgcaaaaattaaatgccgaaggtgcatttgataagaaaccaagtgtattacgttataaacatcagggatcagaaaaacctacaattcatatctctcgcatactctcttctttcttcttctatctcagccgccgattgaccgccctacccgacggcgtagttgacaccatagccacacgacaccagctgggtcaaggggtccaagcctgcgctgcgcggccaagcttttgcccagaccatcattgctcctctcatctttagttggggaagtgggaaagtggcaatcatacggacccatcaaaagaggccccttcatctttggtggcctagctggattggatatttggacgagtgttcttcttggcttggccacccgcctactccgtcttcttcatacgagacaagccgtgcgcttcttcttggcctagcccttcgagcaggtgcgtgcgagcggcctcctcgccttcatgattccgtcctcgcatcgcatggccttctgcgtcagcagatgcctgacgggtggagatttgggagaatcccagtgattctgtgaatcctttttgttctctgcttcgtcggttcggggttttaaggtttttgcgctcaatttcttccctgcagttcactttgggcactaatggttgctgctgtctagtcactgaaactctactttgcggtaggttcgtttcagatatattttcttatagattctggcttccccattgctgtcttgaaaaatccaagtagttaatagcgaaattgagttcccctccaccgaatcgtgcagtattcttgaagaaatctagtcactatactgaaatgtctgtttctgcacttcttcatgttcatgcctaatatgctaatcgtaggtttcgttttttttaaaaaaaaggggaactgctaatcgtagacgtcattggagggattgtttctgattgtccatggttccttttgcacattgtttcagtctactactcatgcaagaagaatcgttcacacgctgaagaacaagaatcggtgtgtatttgcagggcaggagaggaggccactctgactgtcactctgagcttcgcgtcacctgagtactgacggacgacatgggagaagttgaggacatgtacacccaagacgggaccgtggacatgaaagggaatcccgccgtgaagaagggcaccggcaactggcgcgcctgcccctacatcctcgcgaacgagtgctgcgagaggctggcttactatggcatgagcaccaacctggtgaactacatgaagacccgacttggccaggtgaactccgttgcctccaacaacgtcaccaactggcaagggacgtgctacatcacgccgctcatcggcgccttcttcgccgacgcgtacatggggaggttctggaccatcgccatcttcatgatcatctacattttcggcctggcgctgctgacgatggcttcgtcggtgaaggggctggtgcctacgtcgtgcggcgacaaggatgtgtgccacccgacggacgcgcaggcggcggtggtgttcgtggcgctgtacctcatcgcgctgggcacgggcgggatcaagccgtgcgtgtcctccttcggcgccgaccagttcgacgagaacgacgagcgggagaagaagagcaagagctccttcttcaactggttctacttctccatcaacatcggcgcgctggtggcgtccacagtgctggtgtacgtgcagacgcacgtgggctggggctggggcttcggcatccccgccgtggtcatggccatcgccgtcggcagcttcttcgtgggcacgccgctgtacaggcaccagaagcccgggggcagcccgctgacgcgcatcgcgcaggtgctcgtcgcgtgcgcgcgcaagtggaacgtggccgtgcccgcggacaagtcgcggctgcacgagacggtggacggggagtccgtcatcgaggggagccgcaagctggagcactcggagcagctggcgtgcctcgacagggctgccgtggtgacggccgaggacggcgcggaggcgagcccgtggcgcctgtgctcggtgacgcaggtggaggagctcaagagcgtgatccggctgctgcccatctgggccagcgggatcgtgttcgcggcggtgtactcgcagatgagcaccatgttcgtgctgcagggtaacacgctggaccagagcatggggccccggttcaagatcccctcggcgacgctgtccatggtggacaccatcagcgtcatcgtctgggtccccgtgtacgaccgcgccatcgtgcccctggtgcgctcctacaccgggaggccgcgcgggttcacgcagctgcagcgcatgggcatcggcctcgtcgtctccatcttctccatggtggcggcgggcgtgctggacatcgtgcggctgcgcgccatcgcgcggcacggcctgtacggcgaggacgacatcgtgcccatctccatcttctggcagataccgcagtacttcatcatcgggtgcgcggaggtgttcaccttcgtggggcagctggagttcttctacgaccaggcgcccgacgccatgaggagcatgtgctccgcgctgtcgctcaccaccgtcgcgctcggcaactacctcagcacggtcctggtgaccatcgtcacccacatcaccaccaggcacggccgcatcgggtggatcccggagaacctcaaccgcggccacctcgactacttcttctggctgctcgccgtgctcagccttctcaacttccttgcctacctcgtcatcgccagctggtacaagtacaagaagacggccgatgattaccctggcgccaaaggggagcacggtacagagcactgatgggcgagagatggcggaaattgagtgatttctatgtgtggttagctgtctgcctgtctgtcgacttgttttgccacagtttgggtgcttaaacgttaacgtacgtactagttcaatatagtgtctcgggggcgaattggttgtttacatgtcatgtgtttatatatgcgcaatgttcgatcttagtggaataagtcaagtgctcttatgaatcaaggagtgttgatgatttgatgcgtcaagttttaactcgacgcgccataaagaagcaatatgctgcaaaacaac

SEQ ID NO: 2325 - DNA, 2334 bp, Zea mays
catgctccattacatacactttgtttatgccgcctcccctccctagtatagataatgatggatattattgatccgccttcatttattttatttgttttatttataatttcgtcggccgggtttaaatcctcggccttccacgcggacactggcatgcaacgccttccacacttgaagcagccaagctaagtgaggtgagcttagccatgccgacggcttcctctgcccaccgctcactcctcctctgcctctgcctggctctgctctccaacccggtcgccgcctcgccctcgccccgcggcctccgcttctccgccaaggacatcgcggcggtggaggccgcgctgccgcgacacggcagcagggcgtcgtcgtcgtccaagaccaccttcttcgaggtcgaccgcccgctccgcccgcccaggggcagctcggggccctgctccacgctgctgctctcgcactccttcgcgttcacgctcaccaagccgcccgtcaccgcggcctactcgccgccgccgtgcctgtccggctccgacgcgccgccggtctcgctcgccgtgctcgagtggcgcgccgagtgccgcggcgcgcagtacgaccgcaccttcggcgtgtggctcggcggcgccgagctcctgcgcggcagcaccgcggagccgcgccccggcggggtggtctggtcggtctccaaggacgtcacccgctacgcggccctcctcgcggccggcaacgccacgctcgctgtctacctcggcaacctcatcgacgacacctacgacggcgtctaccacgccaacctcacgctccacctctacttccgccgcggcgtgcggccgtccgccgccgccgccgccgccgatgccgtcgtcccggtctccaggagcctgccgctcaacgacgggctgtggttcgtcgtccagaacgacaccgacgtgcagtccgcgcgcgtgtcggtgccgcgcaacgcgtaccgcgccgtcctcgaggtctacgtctcgtcccacgacgccgacgagttctggtacatgaacacgcccgagcagaacgggccgttccgcgaggtcaccgtcctgctcgacggcgccgtggtgggcgccgtgtggccgttcccggtgatctacaccggcggcatcaacccgctcatctggcgccccatcaccagcatcggctccttcaacatgcccacctacgacatcgagctcacgcccttcctcggcagcctcctggacggcgaggagcacgagctcgggttcgcggtgaccaacgcgcagcggtcgtggtacgtggacgccaatctccacctgtggctggaccccaagagctccaggaccagcggcgggctcgtcgcgtaccacgcgccgaagctggcgggcagcatcgtgtcgcgctccgcggacggcgtcgacggggagtacgcggcgacggcgagccgcaatatcacggccacggggtgggtgagctcgtcgcgcggcaacgtcaccaccacgttcgcgcagcggctcagcttctccaacaccaacgtggtgagcgggcagggcagcgcgcaggcgatcaaccagacgaccgacgcgctgacggccgtcagcggcgggcccgcgcccgcgcaggtgcaccagagcttcccgctctacatcttcctgggcggcgacggcagcggcacgtcgtcgcagcggctgatgcggcgcgtggagatcgggttcgacgagacgcggtcccggggaggaggaggagcaggaggagagggcgccgcgtccacgaccacgagcacgctgcggaactcgcaggtggcggcggcggaggtgacgctccgggacgacgccgtggtgggcgcgtcgtggcggatgcaccagacgtacgagtacggcgccagcgacggcggctgctacctgaggaacgtcagcagcgtcggttacgacgtgcttttcgaccatcgcgacgcgtcctgcgccggtacgctgggccgctgacgcttgtcgccgacagcgagcgccttgtcggcgcctccgccgcgcgggccgctggataacggccggggaagcgacagggtgtaatttgtaaatggaacgctgcaccggtggacaaaactgtactggcttggctcggcctggcccacgtccggtcttcaattattaaatataccacggtgacgggccattttcgtgggccaattagcttttcattaagaaaagatgtgacgtgacgtgacgtgatgcagctagtacacaggcagcactaaaatgtaaagaaaaccgctggctatgtttatttaacagtacctgttttatgaaatttgtagaagtgttcatgaattctatacgtctgtaaaaccgc

SEQ ID NO: 2326 - DNA, 2180 bp, Zea mays
tttttttgaacttttttttttgccaacctaggctcaacgcctcatcgccggacgaaagagcggcttgcacgtcggggcggtggcccacagcccactcaacagcaacacgtgtcggcgcggtccggccagacacgtggtcgcccccctccttgcccgcccaccaaacacccgacccagccagctaggggagccacagcaagaaatgcaggccttcccttttgctgcccaaccccaatcatagagcggaacggacggagtgggtgcaaatcggattagacggccacgtcccccccgagcctcaccaatcgccggccctccgcaggcagggaagggcggttgggcggccggccggccggagatctgattgctcttatcttctcccctcccgttcatccaatctgctgtcaccatatctgatctccctctccccctgattgcccgcggtggccattgcctcgctcgcgtctccttcgccgcgcttctaggaagattcggcggcgtgcccatttgtcggtcgtagccttaaccagttcttccccaactccgagctccttccttgcttgggagcagctgcacacacatccgcccaggatattagttagcgtggaggatggcgtccagggacttcctccgcgtcttcggcgccggtgagggggcgggcccgccgggggacgccggcgccggccagcccgacgacgacgagctcagcctcggcctctccctgggcggccgcttcggcaccgacgccaagcgcccgcgcctggcgcgctcctcctccatcgcctccgtctgctccgtctcctctctccacgccgacccgtcccccgccgcgccgctgccgctgctgcgcaccacctcgctgcccaccgagaccgaggaggagcgctggcgccgacgcgagatgcagagccgccgccgcctcgaggcgcgccggaagcgcgtcgagcgacgcaactccatgggctccgtctccgtggcacccgccgacgccgtcagcgggaggaggtccaacgcctcgcaggggagcaactctgcaagcaccacggagcaaggtattggtggaagcatgtttaaccaatccgcagacgcgaagagtccatctacctctgataatagaaatcaaaacgacatgcttcctccgaccaaagcggccgagaagccactaaacggtactgcgacagagcagcagcctcgcctacggacgcttgggtccctcacgacacggacgggcagcaccagtgacatcagaaagctcatgatggaggacatgccaatggtctcatccaaggtagaagggcccaacgccaggaggatcgacggcttcctgtacaggtacaagaaaggcgaggatgtgaggatagtgtgcgtctgccatggtagcttcctcactcccgcggagtttgttaagcacgcggggggcggtgatgtgccgaatccgcttcggcatattgtcgtcaaccctgcgcccttctcgtgaagagagagggttacgctggtgctgctatctgctgtgctgtaacatgtaggctcctttgtttctgggagttcaacggaaggtctctgtatttttacataaatcgagtgtgacagcaaattcaagagaaaaaaaatcatctgcaaatgttataggcttgtctacaaattgacaaggattcagtagcaatgctttgctagctggttttaacagttccctttccagtgacaagtctctgtatgcttcaagagggttcacatccaagataggaacagggttctagatggcattcaagtttgccatgctcaagctattcgatttcgaaggcattgaggaaacagagatatcattatgcttctctaggaggttgagctcccaaaggaatgaagcgaatgctccactctgatatggatccctgtcttcggggttgtatttctgtataaaagaagaggaatagcaggatacgaagtgtccatttccaactattgaaaaagaacatgagaaccgccaccagaatcattttccaacaaacatttttttttggagatgcttcaatgtgactaatgctgaaataatcatcaaacatgtaaacagttatagggcctgtttggttcagcttttttctgaccagctttttcgagaatctagttgtggagagaatctgactgtgtagagaatctaagtatcattaggattacgtgcggag

SEQ ID NO: 2327 - DNA, 1793 bp, Zea mays
tgtggacctcctcacctcacgagagttagaacgcatgctccctcccggcagctgcctacttatcaacagcacaactagaaaaattggcagcgatcgcaggccgcccaacacagcgctccaaattcttttcccatcactgacgaagcgagcagatgagaggagctagcataaattatttttttaagaaagaatcccccactgctagattggctattaattggacaagagagagaggaggggtgcgcggagaggagacggagcggaggaggaggcattctctctctctctctcttcctcctcggtgctcaagaaatccatctagcggaggcgcatcttctccaccatcatcccttctctccaactcccccccccctcgggaattgtgggggtagcaaaggaactggagttcttgcatggatgcagcagcccactggcagcagagcctagggctggtgaagcccctggaggagatgctgatggcggccagcgcgggggctgcaaatccgagccaaggctcgaatccgaacccgccgccgctggcggcgcccctgacggacgcgggtagcaccgagcggcgcgcgcggccgcagaaggagaaggcgctcaactgcccgcggtgcaactccaccaacaccaaattctgctactacaacaactacagcctccagcagccacgctacttctgcaagacgtgccgccgctactggacggagggcggatccctccgcagcgtccccgtgggcggtggctcccgcaagaacaagcgctcctcgtcctcgtcctcgtcctcgtcctcgtcggcggcggcggcgtccgcctccacctcctcctcggccacgagctcgtccatggccagcacaccgggggcggcgtccaagagtccggagctggcgcacgagggcgcgcacgacgacctcaacctagcgttcccgcaccacggtggcctgcacgccgccgagttcgcggcgttcccgagcctggagagcagcaacgacatgtgcgaccagggtggcgggatgacgagcaatggccggggcggcggcgcggggcccgcggtcggcgcgctctcggcaacggagctgttgcggagctccggctgctacatgccgctgcagatgccaggaggagattacacggcggcagggttcgcgctcggggagttccgcacgccgctgctgccgccaccatcgtcacagagcccgctcgggttctctctggacgcgcacgggccggggtcgtccggtgctgccgcagcggcggggtacggttccagcgcggggctgccgcagggcgtgccgggcaacgcgggcaggttgttgttccctttcgaggacttgaagccgccggttagccctggaggtggtggtgtgggcggaggtggtgcaagtgcaaccggtggcgccggcgacggaaatagcagccacgatcagtttgaccacaacaaggagcgaggcggaggcggcggccgcggtgccggtgccgggcacgacacgccggggttctggagcagcatgatcggcggcagtggcgcttcttggtaatggagaatgacgcacacgggggcggcgccatgcatggtttcatgcatgcaaagtgttggtgacttgttctcaaatgctatgagttaagaacaaggcaacatagaaaagtgttaatcgttaaggtccttcgtcctccaaagcattatttcccttaggatataatggtttacggacgaaggttatgaaggacgtaccttcataaatttattaaacaatgacgaaggatggaatataaaggatataaaagacaac

SEQ ID NO: 2328 - DNA, 2244 bp, Zea mays
ctgcaacaagtctactacgagcgggcacggcgcggcgcctccgatttttttcacgggggagcgcccggggcgaggctataaaaaccgtctcctccacgccacctccgcaccgcagagagaggagcgagagcgagcgacccccccgagccgtgccaaccaagaaccatccacccaccaccaccaccccggccgcttccttgtccctgcccctccgttggtctcctttgcccatctcatcctctctctctctctccctctctctctctctggcggtcggcgtggctccgggggcgcgaagcgcgggctcggcggggcgactcgccggcggcgacctgcaggtttgggtatgagaggggtcacccacgcggcgcccaccacaagcgccccccgcccccgcggacgcctcatggacggcctcctcatcttcgtcttctacctctcgctgcccacccgtgccggccgcgaccactcgtcaatcgccgcctctaattgttagccgccgccggcacgccattgctcggcccgcctcccgagaagctcgatctgcggcctagccagccagcctcacgcgggatcaggatcgatggaccagccaccgaatggattcgccgccggaggttttttcacgcacattgatgggcaaaaccgttctcccccttctgtaattgtcattgggggagggatttcaggcatcgcagctgcacgtgctttgtcgactgcttcatttaaggtcacactcttggagtccagggaccgacctggtggccgtgtgcacactgactattctttcggttgcccaattgacatgggagcatcatggttgcatggtgtttgcaatgagaattctttggcaccactgattaggatgcttgggcttaggttatatcgcacaagcggtgataactctgttctgtatgaccatgatttggaaagttatgctctttttgataagcatggtcagcaagttccccaggagatagtaagcaaagttggagagacatttgagagaattcttaaggagactgtcatagtaagagatgagcatgcaaatgacatgcctctttttcaagccatagcgatcgtgcttgacaggaatccgcatatgaagctgcagggcctggaatatgaagtactgcagtggtgcatatgtaggctggaggcatggttcgctactgacatggacaatatatctctgaaaacttgggatcaggaacatgtgcttaccggtggacatggtcttatggtgaatggctacgaccctgtcatcagagctctcgctcaaggtctcgatattcacctcaaccacagggtcacaaagatcatacaacgctataacaaggttattgtctgtgtggaagatggggcgagttttgtcgcagacgctgctatagtaaccgtccctctcggggtactcaaggcaaacatcatcaagtttgagcctgagctaccgaaagagaagctctcggcaatcgccgaccttggcgtcggtatcgagaacaagatagctctcaagttcgacactgtgttttggcccgacgttgaagtgataggtagggtggccccgacgtcaaacgcctgtggctactttctcaaccttaacaaagccacaggaaacccggtcctggtgtgcatggtggccggaaggttcgcgtacgagatcgagaagctgtcggacgaagagtccgtgaacttcgtcatgtcccagctcaggaacatgctgccgcaggcaactgacccggttcagtatctggtctcgcgctggggtagtgaccccaactcacttggctcctactcgtgcgacctggtggggaaaccagctgacctgtatgaaaggttctgcgctccggtgggcagcctgttcttcgccggggaggccgcctgcattgaccactccggatcggtgcacggagcttactcgtcaggcatcgctgccgcagaggactgccgaaggcgtctgtcggcgcagctaggcatctcggccggcctgttccaggtcgggaaggctgccatgagggaggagatgacggctgaagccatggtccccttccagatatccaggttgtaagagagaatctattcaacaccgtctttgtgtcaccggtttgttgcttgatgtaattgtaaaatggtgtaagaccttgtttgttggaatattcgatggtggatgctgtttttcgtcaggtaaacgtcagcgtcagctgggccagatgaatgaatattcgcattgcgcgctgaacggattcc

SEQ ID NO: 2329 - DNA, 747 bp, Zea mays
ccggaattccccgggataaagcattcctgatctatatccccaactcactcgtaactcgtaagtcataacaagacagcaagcaagggaagaacaccaggtcaccagctaggcgtacgtgcggtgggtgggtgcaaccgtacgtgcaagactgcaagcgagcagcttacactacaccgcgccatgatgaggccaggagcggagtcgttcccgaccacgagccacggcgcgcccatggcggcgcccaactccccgtggcagtcgccggtgccgtacctgttcggcgggctggcggcgatgctggggctcatagccttggcgctgctcatcctggcctgctcctactggaagctgtccgggtacctcgacgcggggcgcgaccagcgggccgccggagaagctggcggcgccggcgccggcgccgacggggagaagggctcggcgaccggcgcggccaggccggcggcgggggtccgggagcacgtggtggtcatcatggccggcgaggactggcccaccttcctcgccacacccgcggccagccgggccgtcgcggagctcggagccgacgccggcaccgtgagccggagcagcgcgagcgcgatggcgctggccgagtgaatcgttcgttttttttggtcgtcgtcccggttctcagtcctcttgctggagcggtgtgttagatttagctgccggtggtgtagattgtagacgtgattggttgagactgggggtgtaattaatgggccg

SEQ ID NO: 2330 - DNA, 842 bp, Zea mays
gtcaggcacgcacgcacgagtgaacacagacgcgatctcctgctctctgcctccctcgttctcctctgcccgtgcgcgctccagggcacacacgtacggagcgtgcgagcaccgtcatggaggaggacggcggcggaggcgcgcggcacgtggagcggtgggagggctacgtggactggaggaaccggccggcgaccaggggccggcacggcggcatggccgccgcctccttcgtgctcgtggtggaggtgctggagaacctggcgttcctggcgaccgcgagcaacctggtgacgtacctgatggggtccatgggctactcgccgtcgcagtcggccacggcggtgaccagcttcatgggcacggcgttcctgctggcgctgctcggcggcttcctctccgacgccttcctcaccacctacaccgtctacatcgccagcgccttcgtcgagctcacggggttggtgatcctgacggtgcaagcgcgcacgccgtcgctgatgccgccgcggtgcgcttctccgggcgcgggcggtgctgcctgccatcccgtgtctggggccaaggatgccgtgctgttcttggggctgtccgtgacggcactggggcttggtcgtgatcatggcttccttctctttcccggcgccgaatcctttttcctatctttcgcctcttgggtttcacggttcccctccccttttttttccctccttattctcctgccctccccctcgttgctctttttttacctccatcttttctgggttgcgttccagtcaaactttttctatgcatatcgtcgtatctacctttcttctccccttcccccccttttttttttt

SEQ ID NO: 2331 - DNA, 868 bp, Zea mays
  misc_feature (42)..(42): n is a, c, g, or t
ataaaaacctcgacccagcgtccggctgctgtagtacacctncgccacctgcgccgtcccatcgttccccaacatggcgtcgcagggatcctccgtcttcgccgcactcgagctggccccggaggaccccatcctcggagtgaccgttgtctacaacaaggatcccagccccgtgaaggtcaacctcggggtcggcgcctaccggaccgaggaagggaagcccctagagctgaacgaggacaggcgcgccgagcaaatgttgatcaataatccgtcacgtgtcaaggaggacctaccaatcaccggtctggctgaattcaataagctgagcgctaagcttatctttggcgctgacagccctgctattcaggagaatagggttgctaccgtgcagtgcctatcgggtactgggtctttaaaagtcggaggtgaatttcttgcaaggcactatcacgagcgcactatctacatcccacaaccaacctggggaaatcacccaaaagtcttcaccctatctggcttgaaccgttggcagctccggctttatgaatctgctacatgctgtctttacttttcatgactcctggaggagctcgggtctgtttctttgggcgcaagtgtacttgtggattgcctgggccccctttcctcctggacctcctcctaccatccatagtgcggacccactatggatgtggtgagatccaatcactggctcccttttttggggtgtctattagcgctttctcgttggaaaccttctcccttttccccctccccggccgtggttggagcgtgtgaggtgggagtttctccgactgccgcctcctcgacaccatgtaatctttttgagtgagttcttctcttt

SEQ ID NO: 2332 - DNA, 1179 bp, Zea mays
ctccactcccccctgcccgtcgctctcccccgcatcccatcgcgacccaacccggcgcccgccccggatacggtgcgcgtctccactgatccgcacgatcgcgcgctcgcccgcgccccggccccggcggccggccgggtgagcagtagctggagctgcgtctgcgtgcatggatccctcggggccagccgggccgtcctcggcggcggggagcggcgacgacgcgctcgcgccgccgcagcatcaggtccagccgctgcctcaggcgcagccgcagccgcagcaggccgctccgcctccgcagctcagcaggtacgaatcgcagaagcggagggactggaacacgttcctgcagtacctgcggaaccaccggccgccgctcacgctggcgcggtgcagcggcgcgcacgtcatcgagttcctcaagtacctggaccagttcggcaagaccaaggtgcacgccgccgggtgcgcctactacggccagcccaacccgccggcgccctgcccgtgcccgctgcgccaggcctgggggtccctcgacgcgctcatcggccgcctgcgcgccgcgtacgaggagagcggcgggacgcccgagtccaaccccttcgccgcgcgcgctgtgcggatctacctgcgcgaagtgcgcgactcgcaggccaaggcgcgcggcatcccctacgagaagaagaagcgcaaacgcacgcagcaggcggccgcggaggcttcgacgagctcgtcagctgctgctgctgccggcgggagcgggagcgggagcggcagggctgctgctgcttcgtccgccgctcaggctggagggagtagcgctgcaccgagcaccacttgagatcgagtacagtagacctgcagatcttgtttaattatcgtctccgcatcgcaagatttgagctttcattctacttttgctccacatatgctgcttgcttctttctttctctcggcagtttcatcctttttttgtaacgtgtttctgaatcttttttcctttccgatttattagctaggtcagtatatgactagctagagagttcgtagtagcagccgaaggggggtgaatgggctgattaatcagtgtgactatgtgttcatgatctgatacgcatatgtgtatatatatatccttggtaaagcaagctaggacgattgaggcaaaaaaaa

SEQ ID NO: 2333 - DNA, 2650 bp, Zea mays
agcgagaggtggaggaggagagagagaaaagcgcgggggcgcgaaggcaagctgtagttacacacatcacccaccccgtcgcactcgcaccgcaatctccccgatccccaattcccccattatccgccgagccccgccccgccccgccaatggaccaccacctcacgccgacgccgccgccgccgccgccgccgatggggaactccgcggcgggggcgtcctcgaagccgccgacgccggcgtccacgcccaactcgcgcctcgcctcggcgccgtcctcccgccacgccgccacgccgccgcacgcgtcggcggcggcgtccgccccggcgccggcctcgcgcaccgtctacagcgaccgcttcatccccagccgcaccggatccaacctcgcgctcttcgacctcgccccctcgccctcctccgccgcctcgtcctcgcactcgcacgacgccggccccgcggcctcgtccggatctgcgcagcccgccgcgtcgccctactgcacgctcctccgcgccgcgctcttcggccccgacacgcccgaccgcgtcgcgtcctcggccgccgcgtgctcctcgtcgtcgtcctccttctccccggggccctcgcctgtcggcacccccgccaccgggaacatcttcagattcaagacggaggtgcgccggaacgccaagagggcgcttttttcgggagaccaagaggaggacgcgctgttccccggcattttcaccaccaggggcgcgggaccaaggaaggtgccaaggtcgccgtacaaggtgctggatgcgcccgctttgcaggacgacttctacctcaacctcgtcgattggtcttcacataacgtccttgctgtcgggttgggcaattgcgtttacttgtggaatgcatgcagcagcaaggtcaccaagctttgtgatttgggggtggatgacaatgtttgctctgtggggtgggcgcagcgcggcactcacctagctgtaggcacaaagcaaggaaaagttcagatctgggatgcaactcgttgtaaaagaataagaactatggaaagccatcgcatgcgtgtaggtgctcttgcatggagttcttctttgctttcttctggaagccgtgacaagagcatcctccaccatgatatccgtgctcaagaagattatgttagcaagcttaccgggcataaatctgaggtttgtggactcaagtggtcttatgacaatcgtcagcttgcatccggaggcaatgacaatggactttttgtttggaatccacattcagtacaaccagtactgaagtatactgagcacacagcagctgtcaaagctattgcctggtcacctcatctccacggcctgcttgcatctggtggaggaactgcagatagatgcatacgattctggaatacgaccacaaatacacacttgagttgtgtggacactggcagccaggtctgcaatcttgcgtggtcaaagaatgtgaatgagcttgttagcacccacgggtactcccagaaccagataattgtttggagatatccaacaatgtcgaagcttgccactttgacagggcacacgtaccgagtattgtatttagctatttcccctgacggccagaccatagttactggtgccggtgacgaaacactccgtttttggaacgtgttcccctctccaaagtcccaggtgcgtaaatcaacctggaaaacacgatttcgttgtgtatggttgtttggcttctcatgtggcaacccttctcacgttagcttcctaagtctggttcatcctctgtcttgcagagctctgatagtctaagttgcatcgggggtacatcgtttgttagaagctacatccggtgacccgcagaaacgtagtttgaactgagctcataaggtaattgcagcatatgtggatgatcatcagcatcatcccattcatgacaaccatgccatcaggtcgtcaaccatccaaggtagctgaatttttgagatgccacggcgcagcccgatggaagaagtggcttgcgaatccgggcatggctcttttggccgagagtgtacatatttatcagagcaacaacggcgcgcatgttacaggagtgcagcatagcggaggcctcaagcatcggcattgttcccagctgataagaatacgccccctttttttgttgttatttttttgtccattttgcgggtcaaacgtcgacctggtatgtgtgtctagtgcgctagcagttaacctattcgaaacgcttactgacctgtgacgcccatttctcattcatgctggcacggtgtaagatgagagcacttgttccatggtttcgttcctggtgtcttgaaaaggagggctggttctgccctcgactggcttgtttcgaagtaatagacagtcgagaaacgtgtgttcgttgttgtttgttgatgtatggacaccaagacaatgctgaaccttgtctggctacctttgttgtaaagtgcatgtatccagcttgtggttgaggcttgagaggattcagcacgacagcattgctacgacgtgctgacgcagtgtgtccctgcatcgtcacttggttgcaactctatgattgaagacagttttaatggcagctctatcgtacttgcgggtttgggttttggaagcgatggagagctgca

SEQ ID NO: 2334 - DNA, 1690 bp, Zea mays
ttcagtaacaagtctgtattattcataataaaacagacaatttatttacagttacacgctaaatcagaggtctaattatttaaaattagacgtactcacactgattaaaatagtaaccgaacaaacacagattttatactaaaatagagttagaaattgtgattgaacaaatagagagttcaatacgtaaatctgcagaaaataaaataaacaaaataagaaagacgctcgtggcctattttggccgagtcagcccatgtaggcgaggtggcccatcgattacaagtcaaggtggtttagggattttaatcgccttcctttccgtctagcgccgccgccaccaggaaactgcttgcccgtcgagtacgcctgcgcacgcaggagccgtttcttccgggctaggcctcgccagggggcgccggcctgcgcctttgctagcctgcaccgaggctgggccgcccgcccgcgaggctgcggggtgctcgcgcgaggctggggctgccggggccggcacgcccactaggctgtggcttgcctgcgcgcccgcgaggctgtgtgggtggcctgcctgcgcgcccgtgtggccgcggctacccacgtcggaggcgcgcatccggctctcacctgcgctggagcgtgcctgcacgcgtcgtggctcccgtgccgaaacgctgtcatggccggggctacgcctggccggagtgctagccgagcccgcgctagtgcccgtagccaaccaaagtcacgccatccgagagcgcctccgcgtcgtgcgcctgaccggatccgccaaggactgcgcgctagtgtcgtgcccgcggccaggtcgcgttgccgcgcccgcgtcgagccaggttcggccgcgtcgggtctccgcgctcaggaggccgagcgcccctgcccgccagggcttccaagcgcctgcacgccgccagggcgcggatccagcccacgtcaagccgctcccagcgcttgcgcgctgccagggcggagcggatccgaccgtgctgaggacccacgctgggggtcgcgctcgcggccagcagcccgcggccggtcgggcatcccgctgtccttgcgcgcgctaggtcgccgaggcccacgctgccatggcctggggccgccgtggccggcgtccgcgccgctggagacgcacgcacgtggccgacgctctagtgccgaccgtccagggccgcatccgcgcgccgccaggccggggccgcgatgcgcctgcgccagagtgcgcctcgccggtgctgcacccgtgcctgcggtacgccaaggccgcctcttcccttggctctccaaagtggcgaaaagtaggttgtacgagtgtatggtgaagacgatggagatctcaccttgtcttcccctctcgaatcctacatgaacactcgatgtccagcagcagcagtgtcccgatgccgagcgtcatcaccgtagaggagaaccgccagcgcgccatcgccgctaacaccaaccgctcggtggagagagactcgtgctgataacgtgttaaagtctactcagtgataatcagattgagagagataaaatgacagaaccgttatttgtattccacagatcattacacttatatacaagtgaaggggtgtatcccaagaggtgtgtcccttggggaaaactgtcgcaccccttggattgatcacatatataatattttgtaaca

SEQ ID NO: 2335 - DNA, 1814 bp, Zea mays
agtagtcagtgcacacagaaggtggatgcagatagatgcattgcattgtcaccatcgtagcacctccctctctctctccccttttcgttccgaggaaggaagcaccacagggccagcagagatgtctggaaaagggaagaggcgaagcgctagattgttgaagctggaagagcagaagaacgacggcggcgccgtctgcttccttgacccctggcagatcatccggaacagcatttccggtccgagcgcgcgagggaaaaggaaaaggaatgaaggaatccagccgcagggagaagcttcttgcagccgccaggagccactgtatgcaggaaacagcaatagcttaccaagccaaacctcggtaggacagatcatcgagtatatccttgacgagttggagatgagagacaggcatgagctgtttgcaatgccagacgacatccaggtgactgattatgcagagctggtgagcaggcccggtgacttcgcgacactgagacagaagaacagggatggcatgtacacggcactggagcaattcgagaacgatgtttacatggtgttccagaaagcgataacgatgaacagccaggacaccgtgcctttcagagagggcatggcgctgctggatcaagccaagctggtgttcatgtccctgaggagcaaccagatgttctcggagtcggagctcgcggcgtggcgccagaggcacgcggaccagatgcagcagccgatcacgccggagggaagagagggcggcggcaggggaccaccacgtcacacggctgctgcgccgctgttgcagccgtccgccgccacgccgaggaagaggagcgccgccgagacgaagaagcaggaggacgcccgcaccggcgggaacgctacggggaaccagagagggaggccgcgcggcgccagggagaccaaggccacggcgcccacgccgccgggaaagagggcgagaaaagcaacggcgggctttaacggcggccgcggtctggtggctcgaagaaggctcacttacaatgacgaagctgctgccgatcaaggctggcgggagatagcggcgacgccggtcttccaaggccggcacgttacactcagagaccagccgcaggagcagacgttccgaggcagcctgcagcgcttcgtgcggcacgcggggctgaaggcgcgcgtggccgccgagttcaggagcctcgagtgcgtcgcgcgggccaggcactgccccgtcccgcagtgctggaacggcttcgctcccagcgccggtttcctcccgccgtcgccccggcctccgggcgccgccgccgcggagccggggacgtcgtcagatcagcaggcggcggcgccggagtgcaagctggagacggacgaggtgctcaagctcttcgtgctcatgggcacgcccgctgcgttcttgagcagagccaagaaaatgttcggccaagatgagccagagaaaagcgcgcaaccggccaaggctgccgacgacgcccgggcgcgcgctggcgctgcaacgacggccgagactgggcacgggaagaagagcagcgcgagcgagccatcggccgccgcgtgcgggccgttcgcgccgcccaagttggtccccggccggctgggcttcggccagttcgccgcctcttcagcacgtccgttcaagctgaactccaagccttcggcgtcaaatgattccggcaagaagaaacttcagtgaaagcatagcagctcatccatctttatcatctgtatccatcgatcataatccatatactgatgatccctgaataaatataaaatgcaggcaggttataccc

SEQ ID NO: 2336 - DNA, 2086 bp, Zea mays
ggttttagaagcaagggaccgaacaaggtgagggaatacattataaagattaatattgacgctaccgaaatcaagagtaggatgatttcctagtggttgttttgagttttaacgtctaaaagaaataaagaaacagaaatacatatgcatatgcatggtttgttttgacgtctaaaacaaatttacaaagtttgtaaaagaaaacaaacagaaatcatccatcgtctgtaaaagaaaacaaacagaaatccatcgtttgtaaaagaaaacaaacagaaatacactgcacgcagcctatcacaaacagaaatccataccatttcgagatttatctcctatatatctagtagatcgatctgtttcacagttcaaaattctgctgtcagacttatctcgtaaaggtgtatataaacacctacctagctacctgcctgtccgcgtgcagtgcagaacttacgtagacacaagaagctagccatcatcgtcccccacccgcggcgacagaacgtacgcgctaggcgctagccgatccaccatcaccacctggagatcggagatcggtggcatatggccgccgacgatcacgtcttccgggccaccaacgaggcgtccgtcgccctcctgcgcggcctccgcgccggaaccgtcgacaaagccttcatccacaacgtggacgtgtacaccgctgctcctgaggagctggtcgccggcctggagccggtgccgggcaccgacgtgacggaggacgggtacaacaggcagtggtacctatactgtccgaaacgatacaagaacggcgtgggaagggccagcgggcacaggctgcgcgcggtggagaccgccgggacgtgctggcactcggagactggcccgaagcccgtggagggcttgcccggcgccacgttctgcagcttatcctacggccgcaaggagaaggaggacgaggggacgtcgggtcggcatcgccatcgcttcgacaggatgggatggcacatgaccgagtacgacgacacccagggcggcggcggcgaccacgtgctgtgcaaggtgcaccgttcgtcctcgtctctggccaagaagaaatgcaataccaagaggacggcgacaggcgatcaccccgaggcgccgccaaccaaggtgatccgcgacgtgcaggtgcagcagatgcaggaccccgccggcgccatcttcaccggtgctactgcttacccgacgatggatgatccccggatggtcggaggcgagttgggcaagtccagcgtcgactacttgctcaacatcaacaatgtcgatggggagcagcagcagcagcaacagccatgcgctgagccgagcagcgacgtgcaggtgcaggtggaccccgccgccaccttgatgcccagctatgttcatggtcatcaacaaggcggggatcccctgatggccggaggcaaggaggaacagagtcgacgcgttgagtcaccagaggcggagctcgactacttcgacgactggctcaacaatgtcgattggaaaggtttcctagagatactgggagacaatgaggagcaggggttaccgctgcagcagcaaccatgcattgaaccggccgagcagagcagcgacgtgcaggtgcaggtggatcccgccgccaccttgatgccctgctatgttcatggtcatgaacaaggcggggatcccctgatggccggaggcgaggaggaacagagtcgacgcattgagtcagcagtggcggagctcgactacttcgacgactggctcaacaatgtctatcggaaaggtttcctagagatactgagagactatgaggagcaggggttgccgctgcagcagcagccatgcgttgaaccggccgagcagagcagcgacgtgcaggtgcaggtggtccccgccgccaccttgatgctgggagaccatgaggagcaggggctgccgcagcagcagcaaccatgcgctgagccggcggccgagcagagccagagcagcagaaccgtgccgtccgtttaaaaatctgctgattgtaaacacttgacagggagattcacagtatgcatggttgttttactttatttgatgttattcatat

SEQ ID NO: 2337 - DNA, 1756 bp, Zea mays
cacaatcataaactcttaaattataaataaagttaatacacaatatatagagagagtttatatgaagatggactcttcgtgaagagttcacttagccttctatagatttttaaaagacacctcatttaattgggttttacatggaggtggaagtacttatcatgactgatgttcatacaaaggcaggttcacatggtgaggttgccgaatgccgaggcagcgcagccggcgcccggcagccaccgctagaggcggccggcgtctctcgcaaataccctacaaggacaacgccacaacggcaaggtttcagaaaggaaaaaaaagaaagaggcaacggcaagtcaaatgcagagcgggagtgcgggacaccaacccaggcgcctaaagctaaaggccctctccaaaaccacgccgcgccgccgcattcccgcaagcatctcgccggcggaggcggcgctcccgatgctcgagtctgacgtccaactcggtagctcccgtgcgtacccgggggtccgggcccccggagcgtccaaggaagcgcaagaggggcaccgaggccccgtcgcccaggcgcgcgacgcggagctcggcggcggcgcaagtggacgtggaaggcgcggtggcgtgggcacggcgcgcggccgcgggggagcggtcggtggtgtgcgggcgcaaccgtcgcctcgacgtcgacttggagtcgctggggacggtgatcctgttgttgtggtgtgtgcgctcccagctcaaccccgacatgcctttctccgagaaacaaaaaagaaaccacaaataagcacaaagaaacatattggaatagaccctgtcagatgtcaagctgctgtccctgagtggattaatgacccatctgaggaatgtaaggctaactacagaaatgataatgataccttgcaaaggatgggcacagtggtcaggctgccacccactttggagccaccgaaggcaaggaaagcagtgaatgacatgtgtaaatgctatcatcctggatctgaggcctacgtagaagttaatgtaaaagaggcctggaagagggtcaagtatcaattgggtgagcaggctttcaaaaactgtgggtttggtgcgatgggtgagcgagttctgaagttatggactgcagaagacaagaaaaaacttgctgattttgagaagttgattcctcagagtaagagtactattgaagacttcatggaggttgccttgaagcagtttagctcagagagaacaacagacttggctaagtattgctacaacgtttttcttcctagaagatttgccagcctgaatagagcagggtctacaaactccatagatgcgatttcagatgatgaaggcaatagccaagatgataacaaagtgcatctttctgaagagaatggtaaaagctctggatcgtctttgaagaggtcccgggagtaggagaaatgcagctgacattttgctgctttggacagttgtccattcttttttcaaatggagctggggtagctttgaaggttacatatatctggctatatggactgaagttaacatatgctaccagtgaggagaaactggactgaagttaacatatgctgatgagttagtctaacctttttttttcctcctcgagagagcgtatatgttcatgcgccgtgtcattttgtatggacgcacataatagcaaatcgagaacaaaagacatgtccatttatgaattgttacgatatagcacaggcgatttgatggttgttggaaa

SEQ ID NO: 2338 - DNA, 3458 bp, Zea mays
ctcctctccttttctctcccctcccctaacctcccctccaatccggcaccctcctctctcctcaccccacctcacgcaggcggcattaatggattccgcagccgcggccacctccctccgccccgcgtcctcccggccgcggcgagagccctgacgtgacgcgcttccccccgcacggatcctcctccctccacgccgtcgtttgctcggggtgttcgttgggggagaaggaaaaggtcgctaacctgtgagcttccacggcgactcggcgcggcggcccaatgcggctcgatccggactgctcaacgcagtgattcgcctcgggttgggcgccggctccgtgagcccccacgccgttgaccccacgctgccgctgctccagcgccgccgtctccgcctcggaaaggttgcggtgaggagaaatggatgtagagaaacctgcttccaaggcgcatggtttctttgcgctcttcgattggggaaagaagtctaagaagcgcctgttcgtcgggagcaccagcagtgatccaaatctgaaggatgctgcagatgggaaggatattgatgatagtacaccaacaacaagtacacggtcaaattctatccttgaagatgccccaagtttgaaggaaagcagtgagcacagctgctcatcttcagtaattgatgaagaagctcagtcaagaagaagtccgactgttgtggctaggcttatgggtttggattctatgcccgcggcaagctcacccgaatccaatcccgttccattaactgtgcaaccccctttccaacccaacagccacgaggatttgatcggcagaagttatgttggtagtccccttaagatgccgggtagtcctattgatcggtttaaaatggaagcactgcctccaagacttgccaagaggacactatctgtcgcacagtataagttgctgtctcccatgaaaaaccctaaccatatatccagcaggaatgcagctgatataatggaagcagcatcaaggatcatcagacctggagtagaaaatatcagttcttacagagttcacgatgttgggaacacaaatgctgcacgtgcctacaacccaggagagctcataggagtccaacaaaggtcacagaagcttaatgaagcactgaggaaacgtgatggctctgcgtcttttaggccgccaagtggaaaaccttcagatggaaggttgagaggttcggagggcacctcgtcttccaggatctcacaggcaaatggatgtgctccagttgctccaaaggtcaaacccggcaatagattagatactgctcgagctatgcatgcccaggaaaaaggggggatgagaaaatttggtaaaaagcttgaaacccacaagaaccctgaaaatagcaatgctgaaagaagtgggctgaacagacaaaaggatagtaaccaactgggcacaagttcgtctagtgtgcttgtgccaaacagcagaaaacagaatgctacagtcaccaaacataaagtgcactcaaacccagcaacccccagtaggcaacggagcaatattcaccaaataaatgcccatccaagaaaagcgagggctgccaacacatttgctggaagcagtagtcaaggtagcagaaaggtggacttgcagccagatgctcgtgcaaatgtaagaaataattctgtatccaaagcaatcccgaagccaagaagattacaagacagaagagtgtactctgatacaagccagtcaagtgatagtattaattctgacaggagccagaggcggattcggcacaatattgtgattgatgagcagtcatctttttcaacaaacaaaaagaaagtcagcactgagattgtttcattcacatttacctcgccagttcataagtcactacatggcacccacttccccaatcattcagtggaaaaacaaatattagggaatcagaacactgtgtcaacttcaagcaatacatcaaacactaaacttgatgtcatagatggaaaatttttgggactcctgttggagcagaaattgagagagttgacatctggtgtgagatcaccctacactaaaccagccgaaggtgctcaagtgtaccacacttcaacagctttggaagatatggcatcagcatgtgaaacatctagcattgcttctactgattatgatagggagtcattacagtctttcagtgatggaaaagctactctgccctatacaaatcttgctactagaagtgtccagtcatctcagcctgtgaagtacgatcatggcgtcacggaccgatcagagctcgagcatcttggccaaagcccccttttcacatgggaggtttctatttcaactgaaacctgcagctcatcagagagctggaggaggcctgcaaatggaggaacaagactgttcagttcgaccgaaggagcgacaacttctgattcgacgcgcttcaacaaactcctagaagcggacgcctcttcagaatactccgacacggcctcatcaatcacagtggccacagcagaaatcgctcgatcagaaagtagcagctcgtggcatatggatagcagacaggaggtggagtttataagagagatactgaacgccagctctcccgcccgccgcatctcctatctggagcggttcggcaacggcaactcttcgggtattttggatccacatctactggaggagttaaatggcggcactaggctgctggccggtgaagagggcaaaggtcacagactgaggcggaggctgctcttcgactgcgtcaatgaatcgctgagcgtgaaatacgcgcactacttcagcgccggctacagcttatggttcacggggatggcggttctgcagagcctgtcggcggcagaaatgcatcgggagatgacgagcctgacggtcgccgaggagtggatggtggacgagctcgtgtacagggagatgagtggtcctatggggagctgggtcgatttcaggactgaagcgtaccaggccggcggagacgtggcggcggagctgctgggttccttggtcgatgaagcggttgctgaacttctgacttccggcggctcgtcgtcgtctttgtagctgatgttggattggattggattgggtccccgcgctaacgataccagttgacagccgcaaggtttttgctccatgtattgttccttgtttgtatcctgtatatcggtaggtcgctcgagaaattcgtgtagcgtagcattcctaagatgaaatgtcactaacttacaattgttcgatggttgatcggtttcctgccgagagtggaaagaagaaacattcttgacctgttcactgttctatgggcaattcgagcatgtctgttctgtagggttgttttcatccggtttggttagtttgattggccgaggttgtccggtttcgtagtttgaggttgaaaatcgaacgaccacggcagttctagggttgttaaatgga

SEQ ID NO: 2339 - DNA, 1839 bp, Zea mays
ccaattccaaaaccccgccccctccgtcgccttttccccttccgcaccgcgcgctacgcctcgcgacgccattttcccccggcgatgcctcctcctcctcctcctcctccgcctccttccaccgactcgcacgcggcgctgctgcactcgatcagcaccctcgcttcatacagcgataccctcgccgacttcctagatcagtggaactccgtcatcctcgacgtcgcctccatcggcgccacgttcgctgccctattcccgggccccggttccgaccctaaaccctaccatcccgcgccggagccggacagggagcccgagccccctctcgcgccacagcctgaacccggacccaatgccgcgccggcgcccgagccgcggtgggagcgggagcccagtccctccccgggccccggttccgaccctaaaccctacctccccgcccccgcgccggagccggacagggaacccgagcccactctcgcaccgccacagtctgaacccggactcaatgccgcggcggcgccagagccgcggtgggagcgggagcccagtccctccccggagcccgcacccgcgcccaaccccgaccgcgagcgcaaggacggcggaggcgcaggcgccgcatccgcggcggacctcgagcacaggtgcaagcagatgaactgcgggggcgtccgccgcttcgtcatcgtccacttgcgggacggcggcggcgagtggctgcgccaggtggtgccgggcgcgctgcggcgcgccccggaccccgccgcgctcgttttccacgccgtcggccgctactacatccgcgccgagagccccgacgcggaggccgcgtgcgcgctcctcctcgagctgtacgtgcgcgccgggtgcccgcgcctccgccggggccgggggagcgaggcggcggagctgctgctgcggcaggaggcccgcgaggccgcgctcacgtggcgcagccgcctcctgcgcgtcagcggcgcggtcggcgacgcgcccggcgccgcgggcgcccgcggcctcgctctcttcatggctgccttcggcgtgcccgccgagttcccggcgcaggagctctgcgaccttgtcgacgctgcccaagcctcggcctgcgtccaggtgctcaaggcctccaaactcttcgccaagaagatgcgggatgtcgttatcgaaatgataaacaaggccatgtaccttcaggcgatgcgcatcatcctcgtattcgaattccaggaagctttccctcttgcaccaacactcgctctcatcatcgagaaacttgagcacgacacgaaagacgagaacgaggggcaggcatcggagcgcgatgaggacgacttggctcttttgagttcaatatccaaatgcatggaggatcacaagctatctccctcagaattcactacctttgctgccaagattgcgctgctggaagagcgtgttgggaaggcaagacgacaagcctgtagtacaggagctaagcggaagagaccagaggagtgtgtcgagtagaatgctccctgaagcgaagttcagtttcactgtcacgtagaattttcctcacaaaatagttgtaactctccagattgtatgcagactaaccttcacatgttccagtcttacagacatgtactacctctctcgaatatttgtcacccgctagtttatttttaaataaactaaaccgtgacaaataaaaaagaacggatagagtaggaagtatttctgatatatatatcctgaactcaaacaacaaggatacatcatgtggatttctgaacatcagttgggagatcagtttgagttgccctgatataaatacatcataaatgtttt

SEQ ID NO: 2340 - DNA, 1632 bp, Zea mays
ccgagaggctcgtcctcccctcttaggggcggcaacctctcctagccgctgggacctcccacctctaccccttctctcaggcggcctacctccctgctgctagcgcacacgctcaaccgcccctgctaccctcctccaagcgcccatggcgcgccgctgctcctagcgcgacccgtgggccacgctccccgctgccggtcgcggcgggatccacgccgtcgtcgcctggcacgcaacgctggagctccgcgcccgcgtgccacctgggtctacgctcacacgacggtgcacccgccgacgagcccaaccggagctcctcctagccgtcggggcatcggctctctcttcgtttggccgctgacccgctcgtggccaccaagctcgcgacgtcgccgctccccatgtcggcgcggccccatggccgcgcgcctgccaccagcagcggcgcggcgcttctccccgctcgccggcgagccccgcctgtacttcccccagcagccaggccgtcggctctccctccctcgcgccctctctcttccccagctcccttgtcgtcgtctgcctcaccatggcgcggccatccgccgccacccctccccctgcggcagtggatctgcatgcccctcccctctggctccggaggcgcggtcgcgaccccctcccttccccggcggcttaaatccgcctcggcctgacccggcaagggcctttcccgatggcgtcccgctcgtcggcaatcggcctccctacccggccagcagccgccgtggcctcgcgggcactcccttccccaacggtcgccgacccttcttccatggcgtggttacactgcatcggcatctccgctcgcgcagcccctcgtcatcgcgctagccaccttactgcacgtgccgacacctagcagcgccaactcttcgagcttattccgtcgtggcgtcaaacccctctaagggcgtgttcggttggattgagagagattgagagggttttaatccccagtaagggcttgttcggttctccccccaatccatatggattgagggggattgagagggtttcaatccctagccagttaaaatcccctccaatccgtatcaatcccctccgatccatatggattgaaaataaccgaacaagccctaagtcggattgagagggattgagaggattttaatccccagtaagtcaaaatcccttccaatccgtattaatcccctccaatccatatggattgaaaataaccgaacaagccctaacaggtccacaccattgatccctagggaggctcatgaaacgaaccctgtgttgatctagaagtcctgatggtggcggccagagtttgtctctggaattagaagtcctgatggtggcggccagagtttgtctctggaattagtgtctgatgttcatatgtatctggaacctcatctcttgcaagttgtaaccttttgccctgggccctgctgcaaggcaggaggaccagcaagacttcgttgaaaacacgagagaaagggtagaagtcaataaggcaataaaccagaggttatctattctgaggtctggactttcttctgtactcataactgcatcaagaacaattccctgacatgcaatcgagagcgtgattgcagc

SEQ ID NO: 2341 - DNA, 1938 bp, Zea mays
caacaaattgaagccaaccatcatcagctctcgtgatgtgtcactcacattcgctggtgaccgggccaatggcagcaaatccccttgccacgctcgccatcgcggtgttcttgatctgccttcttctccccacttcgtcttcttcgtcatcgatttgtgtcgcgaggacgcaggaccacgtgagaacggcgttccacttccagcccgccaagaactggcagaacgggcccgtgtactacaacggcatgtaccacctgttctaccagtacaacccgcacggcgcgctctgggacgtgggcaacctctcatggggcgactccgtctccggcgacctcgtgaactgggcggcactcggcaacgcgctcgacccgacggcgccattcgacgccaacggctgcgcgtcagggtctgtcaccatccttcccgacggcacgccggcgatcctctactccggcatcgacgcggaccgccggcaggtccagaacgtcgcgttccccaagaacccgcgcgacccgctcctccgcgagtgggccaagcccgcctacaaccccgtcgtcccgctccccgccgacgtgtcggcgaacgacttccgggaccccaccacggcgtgggtcggccgggacgggctgtggcggttcgccatctccgcggtggccgacggcgtgggcgccacgctcgtgtaccgcagcgcggacttcctgcgatgggagaggcgcgctgcgccgctccatgcgtctcaggacgccgtgatggccgagtgcccggacctgttccccgtggcggcgcgcggcgcggaggggctggacgcgtcggcgcgcggcgctggtgtgcggcacgtcctcaaggtgagcatgccggacacgctggaggactactacgcggtcgggacgtacgacgacgcggcggacacgttcacgccggacgaggactgcggcggcggcgactaccgcaggtggcggaggatcgaccgcggacacctgtacgcgtccaagacattcttggacgcgcgcaggatgcggcgggtgctgtgggcgtgggtgaacgagtccgacagcgaggccgacgacgtcgcccggggctggtccggcctgcagtcgttcccgcgggcgctgtggctggacggcggcgggaagcagctggtgcagtggcccgtggaggagatcgagacgctgaggacgaggcgcgcggcgccgctgcaggaggtggagcccggcggcggggtgcgcgaggtcaccggcatcgtgagctcgcaggcggacgtggacgtggtgttcgagatcccgagcctccggcgggccgagggactggaccccggccggctgcatgaccccgacgcgctgtgccgggagaagggcggctccctgacaggcggagtcggcccgttcgggctgctggtgatggcctccggagacatgcgcgagcacaccgccgtgttcttcagggttttcaggatcctgcacgagtacgctgttctcatgtgcacggacctcagcaggtcctccacgaaggcaggcgtgtacaagccaacgcatggagggttcgtcgacgtggacatcgagaaagacatgagcatatcgttaagaacattgatcgatcactcgatcgtggagagcttcggcggcggcgggaggacgtgcatgacggctagagtgtaccccgagcacgttgcagcaggcagcagcagccacctatacgtgttcaacaatgggtcagctgcagtgaaggtgtccaagctcgaggcatgggagcttgccagtgcgagtgtcaatgttgacgacgatggcggtctgatggctggtggatcgttcgcgaacatgtgccgcgctgaggagtacaattctagctaggttaaaaaactgaacgggcatggatttgtgctatttatgatccatgacccaagataagtcgagcgtggcttgtggtagtgtttggatgaag

SEQ ID NO: 2342 - DNA, 1115 bp, Zea mays
cacagtcgcactcgacagccgccaccaccaccacctggtccacgtcgccggcggcaatgtgggcgcaactggccgtcgcgctgttcgtggcgttagccgtggctcccccggcccgtggctccgacgtgccttcgttcccgctgtcgcaggcgcagtccccatccaactcctcgtccccgtccaacgccgcctcgcggccgtgccacctggacctctcggccgagctcttcggtggggtagccgcggcgtgcggcgccggcggggggccgggctcgctggaccgcggccgctgctgcccggtcctggcggcctggctcttcgcggcgcacgcgcgcaccgcgctgtccgtgcccccggcgcctccgccctcggcgctagtgggggacgagggaatggggcccgacggcgacgacgacgggcccatggtgccgtacgacaaccagaggtgtgtcgacacgctgggcgcagcgctggagcggcgcggggtggcgctgccccggcccaacgcgacgtgcgacacggtgctctgcttctgcggcatccggctccaccagatcggctcgctccgctgccccgccgcgttcgccgtcaaaactggcgccgcggccaggaacgccacgcccaccgccgcggtgaaggccctggagaagagctgccgcaacgcctcctacgccggctgctcgcgatgcgtgcagtccctgcaaaagcaaccatgggaaagggcaatcccgccaggtaaccaccggataggaccattccttgaaagcttgaacacgcatttgtggggacaaacctccttctttcgagcaagggcaaaggcggggtattcgccttcgtattcgccttcggcattgccccccgcctttggctccgggaagctgatcatggagggctccctgggcttcttcgaaaaaagagaagctgacagtgtccagatgcagaacgtgctgtccatcaggaatcctaaacctcctgatagagaagcctgcagcagcgtcagtcccggtgctgcgacagctacttgtggctcaaggagaagacgatctttttaaagattttcatgttctttagcttttatcctctactaggtaaatacccaggagaacaagtacttg

SEQ ID NO: 2343 - DNA, 2587 bp, Zea mays
agggcgaccgggggcaggcagacgaatccaaaaacctcagcatcaccagcggatcccaatcatttacatgccgcctcactccgtccttccgcacgacgctctagtttacccagccatcgctgaatgagccacgcttgctccaaagctcacacgtgccgcggtctccgctcactgctcgcttcgcttcaactactcagctctccgtctctgctttaatttacacgcttttgtcgccgctgtttaaccggggcattggcatggccattggccactataacaactcccgagctacagcccgcacggccgccatgcgtccatccgtcgagagccccatgtacgccgccatggaggggagcaccggatacctgatgacaccgtcgcggttgctcttcgtcttcttcctcgccttggccttcctcgcgcaatgcggtggtgcaagagtgctgaggccagagaagatgctgctgggacactactcttactccagcacaccggccatgcctccatacgccgagttgttcgcaccaccaaaccctccttctcatcctcccggttctcccaactgcgtcctcactccagacacgccaccgccaccgccggcggcgaacactgtccagacgccggccttcgtctactcgtccccaccgccgccggaggtggaatactactacccgccgccttacatcagcccaaacccaccagatatcagcccaagcccgccgcccacggttgcaccgctcccacccatcgtttatccaagcccaccagaagtcactcctagcccaccagaggtcgcgccgtatccaagtcccagtccacccgaaatctcaccgagcccaccagagatatcaccgagcccaccagaggttgcgccgagcccaccgcccactgttacgccgctcccgcccatcatttacccaagtccacctggagccacaccaagcccaccggaagtcgcgccgtatccaagtcccaacccacccgaaatctcaccgagtccaccagagatatcaccaagcccaccagagatatcaccgagcccgccggagatcgcaccaagcccaccggagatctcgccgagcccaccgagctacgaaccaacaccacccagcattgtgccaagcccgccggaaatcacaccgagcccaccggagatctcgccgagcccaccgagctatgaaccaacaccacccagcattgtgccaagcccgccggaaatcacaccgagcccaccgagctatgaaccaacaccacccagcattgtgccaagcccgccggaaatcacaccgaacccaccggagatctcgccgagcccaccgagctatgaaccaacgccgccgaccattgtgccaagcccaccggagtacgcgccagagccaccagcgtacgtgccgagtccgccagagtatgcaccagagccgccgacgtacgtgcctagcccgccagtctacgcgccgtatccacccgggatcatcccgagccctccagagtatgcgccggaaccaccagggatcgccccgagcccaccggaatacgcgccagaaccacctgggttcgtcccgagcccgccggcggtcgtgcctggcccgccagagttcgcgccagagccgccagggcccccggccgtcccctccccgggaggcggcttcctgccgccggtggtgttcccgcccccgttcgcgacaccgttgccaggggggacgacgggctcggagtggtgcgtggccaagccgtcggtgccgggggccatcgtgcagcaggccatggactacgcctgcggctcgggggcggactgcgactcaatcctgccgtcgcacccgtgcttccggccggacaccatgctggcgcatgcctcttacgccttcaacagctactggcagcgcaccaaggccaacggtgccacctgtgacttcggcggcaccgccatgctcatcaccaaggaccccagctatgatggctgccactacattttgatgtgatcacgccagtctcaccgacaaagcagccactgcactgttcatgtgacaatttctttagtatcaatcgtggcctgaagagctttggaagatccttggaactatagacaaacatgctgttctgatgttactgaaggaacttgcagtgggtcactgattttgtatagggtacaaaagactccatcagccatccattccatcctatttagacagtctcttctaactcacctccttttttggcacttcttattgttttgtattattctgatgtacaaggtatgtaatatcatagaagtaaataagcccctgatgaaggtacagctaattcataattactgtccagcggcaagtgttttattgtctcattaacagtttcaacagcccactgttttttgtttatccagtgtgcaagacaaactcacttattttgaacaccctgtcactacttttaaccctgaatcaggctggggcttcattagaagaagcgaatgcctgcacaacataaactggatcgccaaccttgatgacctttccttcacctgatagagattccttgcagactaaattctgcccaaagtacacctagaaaagttgattaaagtgttccatcg

SEQ ID NO: 2344 - DNA, 378 bp, Zea mays
atgaaccggggacgccatcgttcaagaaagcatgtggaaggccaacctggccatgctgcgaaagccatgtccgcggtggccgtggcggctgctgctgctgctctggccggcgccgaagctaccgctgctgctggccttgctgtcaaccagcaccggcagccggggaagagctatgccacgggtgcgactgatccatgctctctgcaatatagcagtgtcgttcacagtagatacttccatctcaaagtcttcggtcaagtgtttccatggatctgcaaacacgaacatgttcaaaaaatcgctcaagtcttcggtcaagtttactcgaaggcagataaaccaaaatacaatcttttggtgatgaacttgtgcaggtga

SEQ ID NO: 2345 - DNA, 2515 bp, Zea mays
  misc_feature (2364)..(2463): n is a, c, g, or t
gttgcatatcagtcgtcgttgcacttacatacgttccagtaccccgcgctagacgctactgccacaataccgcttgattgtagggcacaactgtcagctacaggtggccgtgtggcacggccgggatccagctcgtcgtctcaccctcttctcctcttccaccgacggcgaccgcccccaattttctcctacccctccgccttcactgaggtccccgagatccgagtttccttgccctggtaaaccataatatcatcacgcctcgtgcccaaatcggacgcacgcactcccggtcgaattccctcgagcggagcagatttggatccggctcggccagatggatcccgaggacaccaccccaccggcgccgagccaaggtgatgcggagacaactccgccgccggtgttggaagtggcggcgggggaggacagcctagctagcgggggcgaggcggccgagcgggcccacgaggaggaggagctcgcgcgggaggtcatggagctcggcctccagaacgagtaccttaggtcccagattgctggcgtccgcccggcgggtgacgcggacgaggtccccgggcttgtgaggggctggaaggagcaggtggagaggatgagcagggaggtgcaggaacagcggctgacgcgggaggccacggagaaggccctggagcacgtcaacgtggcctatgctgaggctgacggcaaggtgcaggagcttacggccaagctggcacaagctgaacaaaaaatggaaaaggaactaaaagaacgcgatgacaaatatcttgagctggaaaccaagcttcagaggcttctcaagcgtgcaaaacaacgtatacaagatatacaaaaggaaaaagttgatctggaagctcggtttaatgaagttaatcagaaggctgagcaggctgcttctctgcaattagcagcacagcaggaactggaacgtgctcgtcagcaggctagtgagggcttaagatcaatggatgctgaaagacagcagttgcggacagtgaacagcaagttgagggctaacctcgatgagacacggcttgccttggaggtcagaaacagttctcttgagaaactgcaacaatcagtgcttgagaaagagcagttgctagataaagtccaaggatcccttcaatctgctgaaaataaggggatggcaataatttcagagctcactgctaagcatcagaagcaaatagaaagcttgcaggcgcagctagctgaagtttctgcagaaaggacgaaggcatctgaaaccatacaatctctacaggtggtattaacggagaaagactcagaaatagctgaaattgaagcagcatcaacaggtgaagctgcccggcttagagctgctctggaggagatgaaaggggagcttgttcatctaaaggatgaacatgaaaaagaaaggcaaagctgggagtctacttgtgaatctcttaggtcaaagctggaagcatcagaaaatgcatgccttagatctgaaaaagaatccgccgaagttaaaagtcaactggaattagagttgtcaacacgaagtcaattgttacaaaccaaagattctgatctaatggctgcaaaacatgagattagtcgactggaaagtgaattttctgcatacaaggtccgggcacatgcacttctgcaaaaaaaggatgctgagcttaccgcagctaaaagttcagatttcattaaagaacatgaagaggccataagggaagctgaaaaggaggtggcagctgctttagcagaaagagataaagcaatagatgatctccaaaaggcagaatccagacatggtgatgagattgaggcaagagatatggctcttgctgatgctgagaaaaagctaaaggatgtaatgaagaagttagattctgttacttctaatttcatctcagaaaaagggtcctgggagaaaaatttgatgaatgtagaggaaagctggagattgaaatgtgagtctttgaaggttcagagcaatgaccatgtcgatgatgaactaaaaaagaatttaggagagctgacactaaaatatgagaaactgaaggaagagcatcaatcattccgtgatattgctgatagaatgattgaagacaaggaacgagagataactaaactcctcaaggaaaacagggaccttcaccagtctttagatgctagaccaacagttagcaacaatgatcatcaaagtcaaggacctgttaaggatacaatgagtgttgaattggctgagcaacaaattttgcttctcgcaaggcaacaagcacaacgagaagaggaattggctcagtcacagaggcatatcttagcacttcaactcgagcgtgaaaatcgtctcatgatcannnnnnnnnnnnnnnnnnnnnnnnnnnnnnnnnnnnnnnnnnnnnnnnnnnnnnnnnnnnnnnnnnnnnnnnnnnnnnnnnnnnnnnnnnnnnnnnnnnnagtccggtgctcccagaccagagggccttcggttggccctttgctcttttgt

SEQ ID NO: 2346 - DNA, 1569 bp, Zea mays
tctgttttgcccccccccccccccccccccccccacacacacacacacacacacacatctccccccttcagttcagtgaaacgaaattgggacttccagttcgacttcgtaccaaatgtagttctgataattaacaaaaagatgctcccaaaatcggggagcatctgtttacttcttagtaagttcttttaatcgattgttttctgctttgatttcttttcctttggagtctcagaagagtaataagcaacccgactgttgttcgcctcgcttgtctttttttttctttctttttgggatgttctttgcgttaatttgtggcgattttttacgggtggattaatttgggacggtccaaacaaaacagatgagatgccgagacgcaaggctgtgcagcgccgggggagtgcgggtggtgctgaccgacttccacaggagcaaccgtacggacttcctgctcgccgggccggcgttcgcgggcctggccaagcccgggatggcccagcagttgaacaggcgagacgccctctccgtagagtacaaaaggattccctgcgagtacaaggagaagaacctgtcgatccgggtggaagaagcgggcgacaggagccggggcaagctggtggtgaagctgctgtaccagggcgggcagaccgacgtactggcggtggaggtggcccccgtggggtcgtcgtcggagtggcggttcatgacaagggcgtacgggccggtgtggagcacggaccgggcccccgccggcccgctgcagttccgcgcggtcgtcacgggcggctacgacggcaagtgggtgtgggccgagcaggaggtgctgccggccgactggcgccccggccaggtctacgacaccggcgtccgcatcgtcgacgtcgcccgggacgcatcccgcggctgcaccgccgccgccatggacgactggaagtgaagtgaggatatggctgggtagattaaaaatacgtatgaatacatactaacacgtcgccacatcggtgctgcgacactctggtaagaagaggacagcatgcaatggctccaagaacagcatcccccccaagcgcgtccggctgtccagaggagaggaggaagaagattggagtagctagcagctagggtgtaattgtgtatgcaggatcttctatcaaggtcgatccgattagatgcaggcaaaaaaaaagagctgggatccagtcgacagttctaatgggtcatggcgtcatgccatcctggctgtaccacaaactcgactaaaagcaaaaggaaaaaattaacaaaaaatcacgctatcattcaactaccatgcacggatccataaaattaccccaaaaaaaaaccaatcacaaaatcaaaacaagttttctagatctcatcgtactttccgtggtagaggtatatggccgcctgctcgctatctgttctgttccctgctccaacatccagcgaaggccgagtgggcagacgggtggctgagccagcggacgagaaatcagaatttgttaggttgttgtttgctcttctgccacgactagtatatggaatcaccgcacctttttt

SEQ ID NO: 2347 - DNA, 1833 bp, Zea mays
ccctttgcaattgcctggtgctgctgatctagcaactaaggggcttcttgaagtatgtatatgaacattgtttcccatctctttttcttcttcttcttctggatttgtatgaaatggaagcagaagtgtgttgtcgctctggtgctttgatttcattgcaaatgggctatgatggcaggaaggtgctcaagacatgtgtttctttgtagccaggagcccaggagagtctgactatcattcagcggacaagaacggaccagcatgggttcccatgctaatggcagcacctgtgcaggtgacggtcctccaccaatggagaagcggaaagaaccggcttttcctcttaaaacaatgccactgcatgctaacggctggttgaacgacatgaagctgtcctcgcctactgctgtccctgtgaacattggtagcaacagtgttgcttttgatcccatctaccgagcttggactcagaagtatccttcagctctgaacgcgtttgaaagaattgttgcctgcggcaaaggcaagaagattgcgctgttcttggattacgatggaaccctctcgccaattgtcgatgaacctgacaatgctgtcatgtctgatcagatgcgggaggtggtgaggagtgctgcactgcatcttcccactgcgattatcagcggaagatcttgcgataaggtgtttgattttgttagactcaccgaactgtactatgctggtagccacgggatggacatcatgggtccagtgggaaaaactggttctgtcactgaccatagaagcagaggcactaactccagtaagaagcaggacaaggagatgcagatctttcaggctgctagcgaattcttaccaatgatcgacgaggtgtttggattgctcgtcgataaggttagggggattgacggcgcgcgagttgaaaacaacaaattctgcgtgtcggtgcactaccgcaatgttaacgagaaggactgggcgctcgttgcacggtgcacagacgacgtcctgaaagcctaccctcgcctccgactgagtcatggacgaaaggttttagaagttcgtccgatggtagactggaacaaggggaaggctgtggagttcttgctggactccctggggctagctgactccgacgaggtgctccctatctacatcggagatgaccgaacggacgaggacgcgttcaaggtccgtggtcaatttggttctttccttgtcatgttagaaaatggacttcgatgctttaaaacctgcaggttctacggggaaacaaacggggtttggggattttggtgtcatctgtaccgaaggaatctcaggcgttgtactccctgttggatccacctgaggtcatggacttcctgaagagactagtgaaatggaaggaggaagaagaagcacaacgaataacagtcaagcagttgttagtatctgttgatgactttagggttaacctctgacaaagagggactagggaactcgactgcacctgatgccaattctgcagtctatagccaatctcttcattgtagcctagtaatacattactgcatggtatctcttcattggatgccaagaggcccaggaagaagaatgtgaaggtgtttaggcccaactgggtgcattaatatcttgtttagtctttatatagacagcagtgtccggttaattgatccaacgaagtagctgtttgcaattgcggtgttactttcttgaagtaatagcaaacaaaaatcatgcacccaaaatgttacacatggatgtataaaaatagcacacggataagctgtttcaaacactggatgcccagtgttaccctccatgtagtat

SEQ ID NO: 2348 - DNA, 4074 bp, Zea mays
ttgggtcacgtgaaaagttgcttgtgaatgtaggaggtctagatggacgtaggcaaaaaaatacaggatctgtcaaacaaacagtgtagttcgagaataccatccacatccaggccgaccctgagggatgtgactccgaccgtctgagcgctcacagttctttgtgatcctttttcacgagagagagagagtagagggaacgaaaaaggtcactttttttctgtagcaggaatccaatcgcaatttgcgagggcacaaagctgctctaccatttccgtgccccacgagtacctgtctttccactctcgcatccgctgcttcctcaaaaagaccccctacgaatccgcgccagcatctggttactcttgtcccccactaggagctggaaccaagaaccccgaatgcggcttcgtggcgctcgcctgtggacgtggattgtctccgtccgcttctcgcttggttctggcttcctagttcgcaccacggcaccgcaaagcagatggtagtcggtaagcaccaggtcttcattttcgttggattttaggagcgctgagcgcgcagagcttactgaatttggttttgtgtttctatcgcagactagggattaaccccagctctgctcgccattccggtccgtcgagtatttcgtcgaacagttggtaggggacctctagaacggatgggcagaggacaggatgagtcggtttcgtgattctcgaaatctagtcatgccttcagctttctcgcggtcaatcaatccatcgctcatccggttgtaattgccgaatgggtagtcaagaaaccagatgagctcttcgggttcctgtatgcgacctctgtcccccgtttcatgctctgcggactacgtataactgaagaatctgttcggacaccaaattaaggtcgttggcaagacgggtactcttttcttggtcctcgggaagatgggctctgctcactttgctgccctgcttctgtgcgcctgcttgttcgtcagtggaaccgtggcagctgaccagaacggtaacctcacaaggccagctgaggtgcgcatcggtgcactgttcacgtttggttcggttatcggaatggcggtgagacctgctatcgagctcgccgttgcggatgtcaatgctgaccctagcttactctgggggacgaaactgagtgttcttatgcaggacaccaattgcagtggctttgttggcaccatagaagcattgcagcttctggctaaagatgtagtcgccgtattaggtccacaatcctcggctgttgctcatgtcatttcccatgctgtcaacgaactccatgtcccacttatctctttcgcggccactgatcctaccctttcttcccttgaatacccgtattttgtgagggctactcagagcgattactaccaaatgggtgctatcgctgccatcattagtcaatatgaatggaaacaagtcattgccatatatgttgatgatgactacggtagaggtggcatcactgcactaggtgatgcccttgcaaaaaggaagtgcaagatatcctacaaagctaagttgccacctggtgctgcaaaaactactatcgaggatatcttgatgcaggtaaatgacatggagtctcgcgtctatgttatccacgttaaccctgactctggtcttaacgtgttctcagctgcaaaatctttgggcatgatgagcagtggctatgtatggattgcaacagactggctttctgcagtgatagattcttctgtgcatggtattcctgatgtgatggaacttacacagggtgttcttgtgcttcggcagcatatagctgattctgatatccagcatgcctttttgtccaagtggaataatctaactaggaatggaagctcttactttatgcatgcttatgactctgtatggctagttgctcatgctgttgagcgctttctgagagaagggaatgccatgtctttttctgctgacccaaaattgcaagctaaaaagggaagtagccttcagttagattctctgaggattttcaacagtggagataaactactggagaaagtgtggagtgcaaacttctcaggggtttctggtccagttcaatttactttggaccgagatttggtacacccagcctacgatattctgaatattggtggtacgggattaagaaccattgggtattggtcaaattcttctggtctctcagctgttgctccagaaaacttaagctcatcagcacgggactcttcagccaacaatgtacaactccgtggtgttatatggcctggtcagacttctgagaaacctcgtggttgggtgttttcgcatcacgggatgcctatgaggatcggggtaccactccgaacgagctacaaagaatttgttatgcaagacgatggtcctgacggagtaaaggggttcgcagttgatgtcttcaaagctgcaataagtttgttgccctacccagtctcatgcaagtttgttttgttcggcgatggtttgaagaatcctagctacagtgaacttgttcagaaggtatctgaaaattacttcgacgccgcggtaggggacatagctatagtgacgaatagaacaagacttgttgattttacccaaccatatatagaatcgggtctcatcattgtagctccggcaagggtgattgaatcaaacgcttgggctttcttgaaaccattcacattccagatgtggtgtgttctagttgttatattcctctttgtgggtgcggttgtttggatactcgaacaccgcagtaataccgagttccgtggacctccaagccaacaaatcatgacagtgtgctggtttagtttctccaccatgttctttgcacacagagagaacacagttagcgcgcttggcagatttgtgctgcttatctggctcttcgctgtgctcattattaactcgagctacacggcaaacctgacatcgcttctcacggttcaggagctgacttcagggatacagggcctcgatagcttgatatctagttcgagtgcgattggctaccaagttggatctttctccagaaactacctcgtggacgagctcagtatcgcagagtcccgtctggttgcactaaacagcccatcggattatgcgagagcgctagagctaggttcaggaaacggtggcgtcgccgcaataatcgacgagctcccgtatgtcgagatcttcctgtcgaaatactgcaagttcaagacggttggtcaggttttcacaaaaagcggatggggatttgccttcccaagagactcccctctcgccgaggacttgtcgacggcaatcctggcgctatcggagaacggcaagctccagaagatgcacgacgagtggttgagcgggacggagtgcagtgcagacaacggggctgggccgtcgaactccttgagcctgtcgagcttctggggcctcttcctcatatgcggcctcgcatgcttcctcgccctcgtgattttcttcctccggatattctgccagtacagcagatacagtaaccaggtcgaggcgcagttcgctgagccccgggttctgaacaggccggcgaggctaactaccatcaagtcgctgatctctttcgttgataagaaggaggaggaggtgaagaacgctctcaagaagagacccaatggtaccggtcagcagcatccaagcactcccaacgcggaagaacagcccacattaccaccgtgaggtctacgtaacgtcccgctgcgtaactaatgactgccaaaataatgtggaatcctgctttgaagcgaaagttgtactaacgcacaggcctagttgatgctgctgaaggggtttttcctgtatgtggctttctggctgtggaaacatagcatcggaatcagcttcagactattgtcttcagagaaaatgcaactgcgttaggttaggttgtatttttccaacagcagcgaatctgggcctcctaggccctagcagcaatatctgggagaagtagaattggacttccgtcaatatgtgggcagttgtgcatgtcccttcatattgtctgttaagaagtagcatatcaaccccttccttc

SEQ ID NO: 2349 - DNA, 712 bp, Zea mays
atggccgctgctccttccctggtcgcggccgccgtcgagtcgtcggattcgttcctcccctgctcaccccatggccgacgtctcctctaccagtgctccttccagcgctcggcctccagctcctacgcgcgctccgtcttcccctgccgcgaccccgtggaactcccagctcgtgctcacaatccccatcacctatgcgtccactctagcatctccctcatgcgtcctctgcgcgagcgaatctgccttggtccgaccagcgatacctccgccggctccctgatgctcacgcgcgtcagctgcttctccgcctattgcacttgattcctgtaggtctcgccctccgagttcctttcggtcaccagacatgcatcgctgctgacctccctcatctgatcgggccctacatcagtagcgtgtcttctcgtcaagctcgtggccacggctccctgatgcctcgtcatccctgttctccctcacatctgagctcgcctctgcgtgttcgtatggcgccacagcggtctcataccagcaaccactgctgatgtccgtggttaggacagcaggtgcgctagttgagcgcttgatgcgaaggaccagtgctgagtcgaccacaagatgctgttaatcgtgggcttcttcgcaaggcgatgcggacgaacgaacttaaggatggatgacccgaacaagtgccagaccaaaagctgatcgc

SEQ ID NO: 2350 - DNA, 1140 bp, Zea mays
atgaacattgacttagaaaatgagaaagataaaacaagaaatttggaaagcgaaaacttatttctaaagaattcatgtgaacaacaaaaacatctactttatgttattacttgttcacatgaggaactaaaattgagtcatgaggaacttagtgttgctcatgaaaatttggtacatgatcacgtttttctcactaacaagatttatagtgaagaaattaaaactagtgagaactcatcacatgatttatatgatcaattgcaaaatgctgctaatccatgtgatgaagataagaagaatgtatccacctcttgtgatgatttattagctatgtcatgttcttcaactatagattattattattcttccttgtcttgtggaactaaccttttgaaggaaaataataagctcaaaaacaaagtgaagaattcaagcaacatgtttgagaggtggcataaatcaaaagttagtcatgatcttataatgaaaaatcaaataagatatgatgacaagagtggccttggtttcaacaagagcaatatcaaaggcaggcaattgaaattaaaaggaaataagatatttcacttcatgtgctataaatgccatgagatgggtcatcttgcaaaggcatgccccaataaaaggaagctcaagttgaagaaggaagaatggaggctaaagcatgacaagtgcttcaagtgccacacttggggtcacctcacctcaatgtgcccaaccaagaaactagtgaatccacaagtgaagcctcaaccaaagtcacgagttgagcaaaagaagaatccccaaaagcaaatcaagattaaccatgaatataatggtgatgtggggaaaacaagaagagaaagaagaaggcattcaatatataatcaatatgacatgatgatcacaaatcaaaagaagaaggatgatttggctcaaatcaagtgctacatgtgtgatgatatgggtcactttgcctcaaggtgtcccaacaatcttgagaagaaggctcaagcaaatgagaagaggcaagacaatgtgaagcaaaatttgagaaagaaagagaaggctcaaacaaagagaacttgctacacatgtcgggaaagggggacacatggcaaattcatgtcccttaggtaa

SEQ ID NO: 2351 - DNA, 612 bp, Zea mays
caaacttcagagaccaccccccccccctcttctgctacttccaaagagagagcaatggatagagtacctgatggtgtggaagagcacaagtcagcagcagaccaagctaacgaagctggtctagctgatgatagtaccgcggtaccatggctgaagctgggtcttgatgcgccgaaaagtgaagaagccaagccccctcgagaggtgaaaccagtggccactccacataggactttctcctgtaactactgcatgagaaagttcttcagttcgcaggccctcggtgggcaccagaatgcgcacaagagggagaggtgtgcagcaagaaagccatacaggtttcagatgatgacgggccttaatcctccatctgattcctttctccaacctttgagagtgaactcccactccacgatcctcaaggatcatggtgaaagtgctgctgctgctgttgtagcaagattcgacggaggcccaatgagcagctggatgccttttgcaattgaagaacctggagggttagtatggacagggagcttcacagcaagttcagaggagtccaagaagcaaatagagcaaaaaaatattgacttgaccctgcgcttgtagatt

SEQ ID NO: 2352 - DNA, 1182 bp, Zea mays
accacacaacgatctagctacttcctctctcaagcccataggtgttgtagagcaactcaactagcaatggcttccaagagtacaatgcgttcccttgtcctcatcatggggctcctgctgctctcgtgtagcggcatgagcagcgcggcgcggctgctggaggagatggcgcccaaggaggagtacccgcaccctgaagtgccagagctgcccaagcctgagctcccgccgcaccctacggtgccggaactccctaagcctgatgagctaccgccacatccggtcgtgccggagctgccaaagcctgaggtgccagtgcaccccgccgtgccggagttgccgaagcccgagataccgccacattcgaccgtgcctgagctgccgaagcccgagatgccggagctaccaaagcctgaggtgcctgagcaccccgccgtgccggagctgccgaagcccgagcttcctcctcaccccaccgtgcctgagctaccaaagcccgaggtgccggagctgccaaagcctgaggtgcctgagcaccccgccgtgccggagctgccgaagcacgagcttcctcctcaccccaccgtacctgagctaccaaagcccgaggtgccggagctgccaaagcctgaggtgcctgagcaccccgccgtgccggagctgccgaagcccgagcttcctcctcaccccaccgtgcctgagctgccgaagcccgaggtgcccgcgcacaccgcggtgccggagccggagccggagctgccaaagcatgagctgccacctctacctgaacccgagttgccattgccaccaaaggccgagagccactacccggtgccagggatggccaagccgtgatcggcctagcactacccggaggccggagctagagatgatcacgatgtgatcggcctgtattagtgaacacttcatgtatatgtatttacgtacgcatgctttatattttatactttgatgtctgcatgcgatgttgtggacgtgccccatgcacacaactcgctaggagcgtgatgatgtttgcagttattgcagtagtgtatttgtattccctttgtaattttgtatgtaactactagtatagtgcccgtgcgttgcgacggcaacgacatgtaaattgttcgataaaatattagttcacaatgattacaatattttatgacgata

SEQ ID NO: 2353 - DNA, 821 bp, Zea mays
ccagcaggcaacacaacacaacgacatcacaggaagaaccaactatctacattaccacgtgatacacggagaaccatgccgtcctcctccctcgccttcctcatggcactgctgctgctctcttgtagcaccaccatgagtagcgcggcacggtacctggaggaggagaccaagcctgcaccgcatcccaccaccaccaccgtgccagagctccccaagcctgaactgcctccacaccctacagtgccggagctgcccaagcccgagctaccaccacaccctacgactgtgccggagttgcccaagcccgaactgccaccgcaccctgctgtgccggagctcccaaagcctgaactgccgcaccccgctgtgccggaggttccgaagcctgagctgccgcacccggagccggaggtgccaaagcctgaactgccgccaaaccccaccgtgccagaggtgccggagcacgtgccggtggtgccaaagcatgagttcccgccactgcccgagccggagctgccacccaagccggagagccactacccggccgtaccagatgccaagccatgatcgacctacgatcgacgtcagtgttgttgtttcaggaataaatagttgttgtcccagtgtctatgtgtattgtatgttgtaggatcagtagctagtgtgaccttcagtgttgtacgttgtgctgcatgctttgagatgtacctatatatctctattgccttgagtgtacaatatatacatgcatgtatattgagatttgagtcggtttccttcaaattacttatatatatatgctaactattttgtcttat

SEQ ID NO: 2354 - DNA, 1743 bp, Zea mays
agtcggtgggcgacggtggaaccagaccaggtagcagcgcacaagacgagatcccaacctcgcgatccactccgagtcgcccctccccttccgccgccgatggcgctgccgtcgagcgcctcgcattcggcgcggctgcggctgctcaccgtgccggcgctgcttctgctgttgtcctccgccgcgctgctcgtcttcctcgtcctcccctcgctctccccctcctcggcctcctcctccgccgcctccgggcacctctgtgcctgctcgccccccgccacccacaccaccaccaccgtcaccaccaccaccaccaccgcctcccctgcgcccgtcaccacctcccccgcggacgtcgcctggctgaaggcccagctcgcgtccaactccctcctcctcgccgctggcggcggccacgacgcctggcaccgcctgcgcaagggcatcaacccccgcacacgagagcagcagctcttcgacatcaacagacaccatggcatctctcactatccggacgaagaggcaaccaaccacaccgcgctgccgtgccccggcgagctccttgtggaagagcaccacagcaactacggcgagccctgggccggtggccgtgacgtcttcgagttcctcgctaacgcctccgtgctgacgccaacggagcaggtccttgaaatcggatgtggtacgcttcgtgtcggcctgcatttcatccggtaccttgaggctgggaggttccactgcctggagcgggacgagctgtccctcatggctgcgctccggtacgaactgccggcgcaggggctgctttacaagcggccgatgattgtgagaggggaggatatggacttcagcaagtttggggacacagttatgtatgatctcatctatgcgagcgccgtgttcctccatatcccagacaagcttgtttggactgggcttgagaggcttgcggggaagctgaggccacatagaggccggatttttgtctcacataacattaagttttgctcaagactgggaggcgatgagtgcacacgacggcttgccaaattgggccttgagtatgtggggaagcacactcatgatagcttgttgtttaaccactacgaggtctggtttgaattccgcaggccaaaagtttagatcttgatggtacagaaagagagagtggttggcttctgtgatgcaattttggcagtttcaagcacagattaagccatgccttgtactgtttgaacactactgggacctgacttgagattgagattgatgttcgctcggtgcctaattcaagcatatgcatatacaccaaaagtcatgattgagcaatgctgtggtgcttcagtgtgtcttcccagtttcattcggtgagtggtggatgaaggctttagtttttattagcaccgattactgtatgttctataacttcagtaacatttctggtagaaactatgtgggtagctgatgtcaaagcagtaggatacatgcttctattccgaaagctacctctgtgggctgtggccaaaatagactcttacgagcacacatggttttgtaagctgtaacaaggataactttggttgtcttgtttttgcattttatagagcatgcacatttttatgctgctgtatcctggtgagtatttgcaggcatatgattttgtcaatttacagttacagtgtatccctgtccattgtataccttgtgtttttatcaaattgtttcttcaattgtgtcaatcgt

SEQ ID NO: 2355 - DNA, 2672 bp, Zea mays
gcgcgcggctgcagcgccgaccgctacagcacctgaccgtcgaccccgtcagcgccgtccatggcagcaacgactctgagctgtcccacagcgaggtcgacagggtccctgcgaccgccgcgctctccaacccgcgcgagaaggtccacgacgggctcgtcggcgtgacggagttgtcccgcgaagtccgactcctccgcttctccttgccgtcactgaaccaggcgctcaacacatccatcggcaagcacgttctcgactgcgccatcatcgacggaaagtcgtgcttgcgggcacacacgttgaggagcgtcgcggacgaggttggacacacgacctcagggatggtccagacgaaacacatcaacaaccaggagaagttggacgggatggtcattgtcgagcacaacaccttcggtctcttctctagggagttcgcgcacgggctccacctcatcggcccccgcgaagtcagagccccatccctggttcgagccccagagcagagcagcctccccgatctccacccctctgtgatagcccgcatgaagcagatggcgcgcaagtcgatgggcggcaaggcgccgcggaagcagctggcaacgaagggggcgcgcaagtcggagacgaggacgtgcggcgtgaagaaggcgcaccagctccgcccgggcaccgccgcgctgtgcgagatccgtcagtacaagaagagcacggagctgctaatccgcaagctcttgttccagcacctcgtcggccacgacgccacatggttcctgctcgacatcgccttctacagccacaacaggttccaggaggactccaccagtatcagcgggatccccatgtccaacaccaggagcgcagaggaggaggaggttctcgccacctcgcccaacaggtgtttgacgaattgcttcaaactcatacaaagttgttttagctgggatgcagtgccatatcgacagccttggccaccacctcatatgcaggttgagtttgggtgtggaagtgctgatttatgtccaattccatggctgtttttcaccacaattggtaccaatgaggagataattgacatcacatctgatgatgacaaggttgataatgtggttgatcagctgattgatgaacagatcgcagcagtagtctttgtgccagcgtgtatggaagctacgcctaataatgggataaatacaagcaaaaccatggagacctttgctgctcatcagtctcctgagtatgatagtggattgaaagataaggatcagagaatatcatttgaagatgagatatctgagggtgggcaagctgaacaaagtactccacaacaggaattgtgtgctatgccaccagatactagtgaccgtgaaactgttgagaggacaaccagaagtattgaggtggagcatttctctcaggttgagtcaaagcataaaatgaactctatgtccgtggaagcttctgagcatgtcactatcactcagattgagaagaagcaggttcaacaagttgagataactcaggagttagattcactgccgatatgttctagggagcattctgatgaggcacttgaaggggagagaacagtgcaggctgggttggaacaagagtgtgaggtgctggggatattgtcaacgatcacctcggatatttttgcaatagggctcagtccaaatcagtataccgtgtatttttatcagaatttgatggcctgcatgatgttgatccgtcgcagattcttgctgtcatttggacgtagttgggatgcggtgacgtacaagcaaccatggccaccacccgtgcatgttgtgatactaggagatggcttgtccgtcaggcttacaccttggcaaccatttgatactgatatctacagctttcctgtgaacagaccagaatcatctgcaagtgtctttggtattgcaacagaatcaacgcagtgtgcctatgattcccaaggaaacagtgtctcgacaatcctcttgatgatgcaaagatgcctttatgaacagatgatgcaatacaaatctgaagagggctgtactcgggtagtgaaatgcctcccaccggctgacgcaagtttacttgtctgggctgttaatcagatgacagatccattgattgcattgatgtatgcggtccaagtgatgatttttctcaaggacaaagatgagtcacctcgagaggatgttttgctgctccagaaggacccatttgatggcaacaggcatcagaaacccaacgtgacacttgccatctccttgaggaaagatctaggagtcattgctgcgtgcactgccccaaccaacgaagtaccaacatatgtggaggactacactagtagctcaaaatctgcaactgctggctagtggctatcaccgatgctcccggcatgacaactaaaatttcttaccatcagtggcttgggggcaagccacatttcaagcggtggggaatgtcagcagcagtctaggggagacgctagacgaggcagccgtcgcggaagagcggcgatgtcccagcaaggagcagctcgcatatccgagccaaggggttatgtaaacgagtgggccatgtgttgggtcgtagggtgaagggtatttgagtctgtattctgtatgaactggtgatcaaagaaatagaataccagaaaagccttcgtgctccca

SEQ ID NO: 2356 - DNA, 186 bp, Zea mays
atggcccagcagcctggctgcgctcccgggctgcaactcctgtgtttgcgtcgcctggctggctcgggagccaggctgtgcgcgtgcaaattgagcctctcagcctggctccacagaaacgagctcaagttggagacagggagcgaagccacgttagctttctctgctacatggttaccagggtga

SEQ ID NO: 2357 - DNA, 2724 bp, Zea mays
tggagatggagtctctcttcttctccttccctccgccgcgccgcgaatacgatgccgccgcggtcaccgccgctagcagctgccgccgatgtagcctccgtagtcacccgctgccctcacgcggaaccctcttcagaactcaccgcctccacgattcccgcctaccgcgcgctcatccgcgagctcgtctctgccggccgcctcgacgacgtcgacgccgccctcgcttctgctcgctcccacctcgccccagactccctccaaccactctacgtagcctccattcaagcctacgcccgcgccggccgcctccgtgccgccgtcgacgccttcgagcgcatggacctcttcgcctgcccgcccgccgctcccgcctataacgccatcatggacgccctcgtcaacgccgcctatcacgaccaagctcacaaggtctacgtcaggatgcttgccgccggcgttgctcccgatgctcgcacccacaccgtccgcctcaagtctttctgcctcaccggccgccctcacgtcgccctgcgcctgctgcgcagcttgtcggagcgtggctgtgacgccaaaccggccgcctactgcacggttgtgcgaggcctttatgcccacggccacggttacaatgcgcgtcacctgttcgatgaaatgctcggcagggatgtcttccctgacgttgccactttcaacaatgttttgcatgctctttgccagaaaggggatgtcatggagtcgggggcactactggccaaggtcctcaagcggggcatgtcagcaaacaagttcacttgcaacatatggatccgtggcctctgtgaagacggcaggttggaagaggctgttgcgctagtggaaaggatgggtgcctacgttgcgccagatgttgtcacttacaacacattgatgcgtggcctttgcaaggactccaaggtccaggaagctgcacagtaccttggtaggatgatgaatcagggctgcataccagatgatttcacctacaacaccatcattgatggctactgcaagagcggcatgctgcaggaagctactgagcttctgaaagatgctgtctttaaaggttttgtaccagaccgggtcacatattgctcactgatcaacggactgtgtgccgagggtgacattgagagggccctagaactcttcaatgaggcacaagcaaaagatctgaagcctgaccttgtcgtctacaactctcttgtcaagggtctctgtcgccagggtctgatcttgcatgccttgcaggtcatgaatgagatggtcgaggaaggctgccatcctgacatttggacatacaatattatcatcaatggcctatgcaaaatgggaaatatttcagatgcggcagttgtgatgaatgatgccattgtgaaaggataccttccagatgtctttaccttcaacacattgattgatggctactgcaagagattgaagctggacagtgcacttcagcttgttgaaaggatgtggacgtatggcattgctcctgatgttatcacatacaactcagttttgaatggtctctgcaaagctggcaaagccaaggaagtcaatgaaacatttgaagagatgatacttaaaggatgccggccaaatgctattacttacaacatactgatagaaaatttttgcaagattaatcaactggaagaggcttctggcgtgatagtcaggatgtgtcaagatgggttggttcctgatgcagttagtttcaacacgctgattcatggattctgcaggaatggtgatcttgatggagcatacctactctttcagaagttggatgagaaagggtactctgcaacagctgacactttcaacattctgattggtgcgtattctagtaagctgaatatgcaaatggctgaaaagatttttggtgaaatgatcagcaaaggatataaacctgatttgtatacttatcgcattctagttgatgggttgtgcaaggcggcaaatgttgaccgtgcatatgcgcatcttgcagaaatgataagcaagggttttgttccatcgatggctacttttggccgcatgttaaatttactcgcaatgaatcatcgggtttctgaagctgttgctattattcacattatggtgagaatgggagttgttcctgaggttgttgataccattttgagtactgataagaaggagatagctgcaccaaagatacttgttgaggaattgatgaagaagggtcacattagttatcgtgcttatgaagttcttcatgaaggagtgagagataataaattaactagaaaagctcgaaaggcagatgcatctattatgtttgtttcacaacatcataaaagatcatatcaataagctgataaagctttcatgtgtctgagcataagatctatttatgctattaattgagttctccagattcatggatgctgctgtacgctgttatttcagggtctcattgttcagaatttggtgattatctgatcctaattgtattaatacaaagactcagggcatttcctatgtacattatgaaggcccatgttagttcaactttgtggtaattctatggaactaccccctccatcctagagattttaggacaaattaagagaaaatacaaaagacacatatacccttcattcctaatcagatactatcatcattcatcagcgtgattatgtggagattgtgtaacaccccaggtgtttatcgtctact

SEQ ID NO: 2358 - DNA, 2225 bp, Zea mays
agcttcacactggaaagagggtagtgagggcagccgaaaccgaaactaactagtagtccagtccagtccagtccagtagtgacgctgatcgtgtcgagagggacaaccacacacacacactgacacaattccctctgccgcacgctccggcgggaaggcgccttctccctccctcctctactcttctgtctttctccaatggcggcgattaccgcgccgccggcccctcccccggcctccacctcatgccgcctcctccgccgccgcgcgccactcacccgcttcgccgcctcctcgtccccgtcctcccgcttccgcccgtcctcctcctccttccctgccgcagccggcagcagcagcggcggcgggggcgagatcctccacgtgtcgccgcctcccccgcccgccgcgcccccgggggttcccgtctacgtcacgctccccgccgacgccgtcgacccggggggccgcgtcgcgcgccgccgagccatgggggcctcgctcgccgccctggccgccgccggtgtcgcgggcgtcgccgtagagctctggtggggcgtcgtagagcgccgcagccccggggagtatgactgggccggctacctcgagctcgccgccatggcccgacgccacggcctccgcgtgcgcgccatcctcgccttccaccagtgcggcgccggcccgcatgacctgccctggattcctttgccgcaatgggtgcttgaggagatggataagattccggacttgtcatataccaatagataccagaagagaaacaaagaatacatatcactgggatgtgatattcttcctgttctgaaaggaagatcacctatgcaagcttactccgacttcatgagaagcttccacaatacttttgaagattaccttggggacacaataacagaagtacaagttggaatgggtccaggaggtgagcttaggtatccgtcatacccaactgagaagctaaatcagccaggcagttcatctgaacttggggaatttcaatgttatgataagtttatgcaagcttcgttgagtgctcgtgcacagatttttgtgttacaacagtggggcaatggcggttcaactggcacagatggttcacagcagaaccttgaagaaacgagtttttttcgcaccgatggaggctattggaatacaccttatggtcacttttttcttaagtggtattcaggaatgcttctcctccatggagagaggttatgcatgatagctgatgcaatcttctctggtactggtgtgaccatctcagggaaggttgctggaatacattggcactattatacttgttcacatccatctgaactgacatctggctactacaatactctattaagagatggctatcttcctatagctcaaatgtttgccaaatacaaagctacattgtgctgcagttgtttcgacctgagggacgcagaaagaacaaattctgagagcagtcccgaaggtactctccggcagcttgcaggtgctgctaaaatgtgcaaccttcctcttaatggtgagaattctgcgacaaggctggatgatgcatcactgaatcaagtgataagaagctcaaggctctactcaggccgtacttcaggaacatctttttcctttaactatgttaggatgaacaaaagcttgtttgagtttcacaattggaatcgatttacaaagtttgttaggcagatgtcagatgccaggacctttctagcaagactgtatgtcaggagagggcagcaatacttgtcttcaatgtcagttgtttgggtggttagtcgggcttgtgcatatacatgaaagttgtcaaaagctattgcggataatctcagccataaatggttccaccactgtggatggaaaaggtttgctcagtatatggctcatttttagttgccagaagggcaggcaggcttatatgctgaaggctgtactgatttcatgcatatgcatgtattagtttcatgcatatgtcatcgctgaacaaaagtttatagttatttgttgtaaagtggcagactggcagtgttttgctgccaacaatattgaatcgcacgagggtcctgtttagccattttagaaataattagatggagcttcatgttttcccgttacaatatgaatgctttcaaactatatctgcctatgaaaatatgtatacttcctcttgtcacaaatgtcaaatataagtccatcttagtttatcc

SEQ ID NO: 2359 - DNA, 1623 bp, Zea mays
ccaaacctgatgcgctactgcactactagtgcaagaaaatactagagtgactaacctgcaaattgctccttgtttagcaatttgtgttgctccacctccaagcagagaaaacaaaagttccgggggaaaaaattacgcgctgccaatcaggtgaggtgagcaaaggagaggagggtggaggaagacgaagaggacaagaaaaaaacggcagcggcagcggcagcggcaggaacagcaacatcaagccagcaacaaatatgatttggtgaggttgaagttgaaccatccgtgaggtggcccgtcccttttcccctcagcttctccacctcgcgcctatagatccctctcccccattacacctcaccgccaagctcacggagtagcagtgacaccgcagcttccaagaaccgccccccggcctgcggagcagagcagagcaatgtcttccaacggcaagcccaccccgcagcccccggcgggcggcaacggcccgcccaagatgtaccagcggcccatctaccggccgcagcaggcgcccgccaagcggcggcgcggcgggcggtcctgcccgttcagctgctgctgctgcttcttctggacggcgctcgtcgtcctgctcctcgccttcctggccgcagtggcgggcggcgccttctacctgctgtaccgcccgcagcggcccgcgttcacgctgaccgcggcgcgcgtgacgaggctgagcctgtcgccgtccgccacggcgcccgcgctgagcgacgccatcgacgtgacgctcacggcccggaaccccaacaggaagctcgcctacctctacgacgacttcgccgtgacggccgccacggccgccaacgccgtcccgctgggcgaggcctccgcgcccgggttcgcgcacggcgccggcaacgtcaccgtcatccgggccaccgtctccgcgtccgcgctcgcggtcgaccccgccgcggccgcctccgacgtcaagaggtccggcgagttcaccatcgctctggacctggagaccagggccggcgtcagggtgggcgcgctcaagactaagaagatcggcatcctggtgcactgcgacggcgtcaaggtggccgcgcccgcgcccgcgcccgcggcgccggccaagagcaagaagaagcttgcgaaggcggcggtagcggcagcggtggcgccggcggccgacgccccggcacccgccgcctccgcggctgtcgacgacgcgccggcgccgcccgccgcggccaccagcgtcgcgcgcgtgtgccaggtcaggatccgggtcaagatctggaagtggaccttctagtcacgtcggcagcctccgaggggccgcattgcaattttttcgggtataaaatggaaaatatggcgttgcttttcgcgtcggatgaagtttctcaactggaaccgaaccaaataccggtcgctgtaatttttttttgtgcttgaattttaccaaaaatttggcgggggaggtcgagaggcaggaagtgacttgcgtgctcaagccagtcagaggaggctatacatttctgttctgtagtgtgaggttttcttttttgtttttgtttttttttgtagtgccgtttcttcattttcattcatcttgctgtagtactg

SEQ ID NO: 2360 - DNA, 1305 bp, Zea mays
ctcttgtcttcttcctcacccttcctcccgcctcccctacaaattgcctcgcctgtccgtccatccctgtcgccagcccactccttgcacagttgcacttgccaccgtatcgaccaacaactggtacgtacgagcgaccttggctagcaacaaccgggagaggagaggagaggagggatggttcgctcttccgctgccacggaggtgggccaggtgccggacgggaggccgctgccggctcccgtggccaccggcggcggcggcggcggtaccggcacgggaggcgggcgggagccggagggcctgccgtgcccgcgctgcgagtccgccaacaccaagttctgctactacaacaactacaacctgtcccagccgcgctacttctgccgggcctgccgccgctactggacgcgcgggggagcgctccgcaacgtccccgtcggcggcggcacgcgcaaggccacgcccgccggccgccgcaagcgcgccggcccggcgcccgcaaccgcggcgccgcctgcgcctccgcctccgagcgcgctccacggctcgctgctgcgcccgtacggtgggctgtccttcgccgcgccggccctggcgtcgccgctcgccgccgtggacccggaccgccggctgctggacctcggcggcagcttcacgtcgctgatcgcgccaggggccgacgtcggcgtccacttctccgccgagttcctcgtgggcggactcgcgccggcggccctgcctcgcgcgaccgcctctgtccctgctctgccgccaccgccaccgcagcagcatcagcagccgacgacggtgtcccaggcgttgccggaaggcctgttctggagcatggggtggccggacctgtccatctaagagctccatgcctccgccggtgtcccaggcgcgctcggtgcatcgtccgtcaccggtgcccggctaatgactgctgcgtgcgggtgcatcatcgctaatctagctttttctctttctctcttttagctgtttgaattaacagtagactgtagtgctgcatccaggtgatctttttgaggggggcaagttgtttagtcatcatgaaacttttccagtcaggaaggaactgtgagagagtgatctgatctgctgaggatgtcatgaaaaactctgcatgctcggttgccttgcctgcatgaggacctgtgctgcagtgcgtgagcaattgagcttgaccaaccgataccatcagcagattgttttttggggggtcgaaaacgttgagctgattggtgctgtgctgttttctgtgattttcctttcgcgtgatct

SEQ ID NO: 2361 - DNA, 1734 bp, Zea mays
atggtatgcatgggcgacctaatttcattatgtggcttcgggaccgtgatgccaccaaaatcaaagaagtcagtgaaggggttgttcaagggcctgggcctttttcagggcagttcttcgagcagcagcagacgtcgagagctattgaacgcggtacatggagatgaggatgagcagcacactgaggagcagcacattgagcaggagcagcacaatgaggctgagcagcacaatgaggaggtggagcacaatgaggaggtggagcacgtgacatgggaccaggccgcacagcatcaccagccatgggaccagtgggaccaccagagagagcagcaacaggcgtgggaccagtggggccaacagggcgaaccggctgacaacccgatggatgatggctcgggaggctcttcagcgacacgcacacgtcgctcaagaaaaagccactcagtaaagcctcgtcacgcgatagagcgagaggctgataggactttaatcatgccacatggagatcggaattgggaggacctgtcctttgacggcaagggacaccacactcaggttaaccttacgttgggttctctttgccgccttcactaccctggtatagtgaaggtgtcaaacggtgataccgaggatgaggtgctcgtcagtacctgggatgagtacaagtttaaaaaggaacgaaaccacatcgacagacagggacttgtgcgtaatgacttttggtttcgatatcggttgcctgacggagaggattacatggggcacgctgaacgtgtcttgcaaaacaatgcaaagaagctggtgatggttccatggatggcgcccgtgcctgatgcgtactatgcttggtgtcgatattgggcttccgaaggcttccagaaagcgtcagcgcatcacagacaatgtcgaggaaccaatcctaaccacaagtttggcggtgacgacatgatacgaaaagctaaaagaatggaagctacgagtggccaaaagcctagtgacattgaggtctaccaggagggccacaaaggaccagacccgaacaaccctgaccagctctgcagccagacagccacggatcgcttggcggcatatggggaggagatggttcgtcgccatggccctgactacgactggcgccatgaaccggtggatccctcggtggtgtacgcaagtggtggtggcaaagcgcatggacgatacgcactcttcgacggattcattgactcgtcgtcggtgagatctcagaggacgggttcatcttcccgtagctcatgctctcgtcgaccgaacgagcaggagttggagattatgaggatgcgtgaagagatgagacaacaacgcgaatttatggaagcttgcaatgctcataatcaagcgatgtatcaagataaatctgaaacccaagggaccctcaagcgcttcctaaggagagctcaaaacgagtttgagctcaaggtgaagaagataaggagcgacaacgggtccgagttcaagaaccttcaagtggaggagttccttgaggaggaagggatcaagcacgagttctccgctccctacacaccacaacaaaatggtgtggtagagaggaagaacaggacactcatcgatatggcgaggacaatgcttggagagttcaagacccccgagcgattttggtcggaagccgtgaacacgacttgccacgccatcaacagggtctaccttcaccgcctcctcaagaagacgtcatag

SEQ ID NO: 2362 - DNA, 633 bp, Zea mays
ttaaatcctgacaaacttttataaaaatactaaaaccataaattttatttaatgtttttatttacaatataaaatagaaatgttaggatatgaatatgcgataacaagatgtattcttagtgggcataggcccataagctccacattcaatacgggccacacgtgggcggtctttttttttttcgtctggcgtggcgtgggtctctggatgagtgtggaatacggcccgtctcgtctcagacttttggattttgggtgtttggcacgaatgcacgatggcaggcgcgctgtccaccacctatggttctacaaacacaccgcgatggactcgtggttcgtgaatacaatatgcttacactcggattttttgacgctagcggagcatgcgaaaaaagagagaggatatgtttttgttttgcgacttgtgagagatcccgtcaggctgtcacatatacgagacagtgatttaagtgatgctcttagggagtgtttgttgaaggaatcactccgtctaaatataggtgatgtatcatgagtttatttctcaaatttagtgagatgacttaattcctcgtattagtactaactaattatgaggaatgagatgatgatagatcaactcattctatttca

SEQ ID NO: 2363 - DNA, 1484 bp, Zea mays
agagctagtgttttcttttctctccccctcccctctcctcccatgtgacgtcgcctgcaggctgcagcggtcggtgccggccagccatccccggcgagatccccccctctccctctcccatcacccccgccgccaacgtctggtcgcacggaccataggccgccaatgcccacgtcggattgctcggggtcctaccataggtccggatcgtggctccccctcctgtccctactatgccaccacgcacgggagcatgggagggcgcctcggtgtcgcccctgccaccgtctacgacctcacaccaccactgccctccacatggctgcccattgctgccgccgcgggcacgggcgcgaagctactgggagtgggggttcttgctgccttggttgttggctttagctacgggtgctccggtggtgcccatcgcgcccacgctatctttgtcgttgccgtccttcacggtctcagctctcctaaagcacctattgagctcgtagttggggtgtcagtctctctcgggtttcctccacccatcggtttcacgagactgtattgaaagtgaaatgtgccttgggccatttctaagtattttggtgatttagtttcaaacacaagtgcttaagtgtaaaatggtggacaaagtacaaaccaaggataaaggtatgtttctcagacttagtacattgttttatggactaatgtattgtatctaagtgctggaaacaggaaaaatctaattggaaatatcttggctcgagcagccaagaatctgctcagtctgggagcaccggactgtccggtggtgcaccggacagtgtccggtgcgccaggctggttcgagcgaagtggccgctctcgggaattcaccggcgacgtacggctataattcaccggactgtccggtgtacaccggactgtccggtgagccaacggtcggccgcgcgatctgcgcgggacacgtggccaagccaacggctagaagggggcaccggactgtccggtgcgccaacggctccaagtctgccaacggtcggtttcgccatgtaaggaaagaaatcaggcacccgacagtgtccggtgtgcaccggactgtccggtgcgccagacgacagaaggcaagaattgccttcccagattgctctcaacggctcctagctgccttggggctataaaagagacccctaggcgcatggaggagaataccaagcataccttgagcactcttgatcactcacactctattcttgcgcacttgttcgacattctagtgatttgagctccgttctagtgtgctagtctcttgagctcaagtctgggtcttgtgtgtgcgtatttgctgtgatctttgtgtcttgtgtgagttgctaatcccccccttactccgtgcttctctgtgaacttcaagtgtaagggcgagagactcctagttgtggagattcctcgcaaacgggattaagaaaagcaaagcaaaacaccgtggt

SEQ ID NO: 2364 - DNA, 456 bp, Zea mays
atgggcacggcgaggggcgcgggcgccgcgggcgggccccggcacggcgagggcgagggcaagcggcgcgggcgggcggtggccccggcgcggcgaggggcgcgggcggacggcctcgggcggcggtcccggcgcggcgagggcgacggtgaggagctcgggcgggtgacggtcccggcgcggcgagggcgagcgcgaggggcacgggcgggcggcggtcccggcgcggcgaggagcttgggtgggcgagtgcgacggcgaggagctcgggcgggcgagggcgacggcgaggagctcgggcagacgaggggcgcgggcgggcagccccagcgcggcgatggcatgggcgggtggccccggcacggcgagctcgagggtggggggcgtggcggcggcgaaacgggcggcgagggcgcggcggcggcgacggtgagtgagatagtgagagttaagtga

SEQ ID NO: 2365 - DNA, 1143 bp, Zea mays
atggatgcaagccaggatgtgtgggactgggactgggagctggtcctgccagaccacaggagcttctccctgagcaatggcggcaagaatcttgatgataaagaaacagtcgagcatgatctgctgcccccatcaggagacgttgacgtgcacgacgagtgcaagggcatcggcgtgctggatgagacctgcaaatccgccgtgcctagtgttgccgatccgataatgaattctgagggtggcgaggaagagaaggcaatccagagacctgatgccgaggagtccgtcaccgccgacagcaagtttgctcaagaggaggaggaggaagaagaagatatcaagaaggacggcgacgataaggttggagccctgatcggcgcgctgtgctcgtttggggtcgcagccgccaccgcctgcgtctttctcatcggcggcaggctgcatcatcaccacacgcagcagcacaaaattcagctgcagttcttcggcgatgataagggtgtgaagtccgcatttgacggtgtcgtacgggttggaggtggcacgtatagcatcaaccatcaagtagagcgtgctggcttgtggtggactcatggctcggccccctcagctaacgttgttaccaagggtgaggatgttggggaagtccctgtcgacgacgacggcggcgatgacccatggcacgacgttgatgactgtgtcatcataggggctgaaattgccgctggagtatacgacggagacaccatgcatggcggcgtggagggagccaagcgtgacgggctcatggaagaaggacttggtatcgtaagcgagagacgcgtccaagccgaaggagacgaagatgacatcagtaccgtcatggatgtaggactcgaagccagggaggacgccgacggcggcaacgcactccgccgaccagcagaccttctaggccgcgacacgtgtccgtggcgtgccgcttttggcggtgacagtggcgtatccgaagaggctggcacggggtacagagctgtcgacagtgatggagagcgtgtgggtgccgcggccctcggtgtcgtacgtccagttagcgccatggtcgatttgctgagtagcatttctttgttgaagaaccaggtgccgatgatcttgcggttgtag

SEQ ID NO: 2366 - DNA, 546 bp, Zea mays
atggtgaggatgttggggaagttcctgtcgacagcggcgacggtgatgacccatggcgcggcgttgatgactgtcatcataggggctgaaattgccgctggagtatacaacggagacaccatggatggcggcgtggagggagccaagcgtgacgggctcatggaagaaggacttggtatcgtaagcgagagacgcgtcctggccgaaggagacgaagatgacatcagtaccgtcatagatggcagactcgaagcccacgaggacgccgacggcggcaacgcactccgccgagcagcagaccttttaggccgcgacacgcgtccgtggcgtgccgcttttggcggtgacagtggcgtatccgaagaggctggcacggggcacagagctgtcgacagtgatggagagcgtgtgggtgccgtggccctcggtgtcatacgtccagttagcgccatggtcgatttgctgagtagcatttctttgttgaagaaccaggtgccgatgatcttgcggttgcaggcaaaaccatgcttcacggagtcatggtag

SEQ ID NO: 2367 - DNA, 1203 bp, Zea mays
atggttttggagactgcagggggtcacggccgcaaccccaatggcatcctcggccttctatgccgggaacactttcctggacttgtcgagtacgccggagtgacgagcccagcatacaccttcgaccactacgccgtcgcccccgatgcagtagatcgggacggcagacaattcaacaacaaggcggagcgggtgaagcaagagctgtgggatttcttcaggtgcgatgctggatacgaggccagggcggatgtggtgtctacgacgtgctgtaagaagctcgtcgtggacatgcactacgaggcgcgcatccaggccatcgtcacttaccacggctccgtccttggggagaaggtgaacaagaaggacgcccgaaccatgtcattgactgcggaccagtacttgcagatgattcctcattggtgcgccgcgcatcctgagtgctgggagaagatggtgcagaggtggtgctcggctgagtgggacgaggcgcacaacgctagccgggaacggcgtttgctgatgcaaggtccctcccaccatcaaggcagccgcagcctgggcaaatacgcggaagcatggtcggcggcacatggtggcgcgccttgctccacgttctcggcatatgccatggcccacaaggggaaggcgacgtccgacgtcacctacaacccggatgacgggcccgaggcgtacaccaaccccgccatccacagccgactcagtgagtacaccgccatggccaaggaggtccatgggccagattacgatccgaggaccgaggacatcgacggagatgtcctcatgagggtcggaggaggcaagaggcatgggcggtactggattgccgacggggcaatcgactcgtcctccactcccactctctctcaggtgcgagcaaggagcacgagcgcgagcccagccatacgacctcggcaggacacctcacagcatcgtatccagcaactccagactcagctagatgatgagaggaggcaacgtgaggagctggagaagaggatggcggagatgttcgcgtacatgcagagccttggcgccgcacagggtcatgctccaccacctccgttattccctgcagctgaccctacagagttcactactcctggtcaatcggtggcgtcgaacaaccctcatgcttcgtccagcccttcgccgaaccagtccagatgcccacctcgttga

SEQ ID NO: 2368 - DNA, 1386 bp, Zea mays
agacggggacggcaccggcagcgctccacaggcccaacctgccgtccacggcgcgaaagaagagccgcgaacccgggagtcctgcctgtcctcgtcctcctcccccttgccatccgccgcccatggcgtccgcgtccgcccccgaagtggtggtggtcttcgacttcgaccggaccatcatcgactgggacagcgacgactgggtcatcaccaagctcggcgccgccgacgccttccagcgcctgcgcccaaccatgcgctggaacccgctcatggacaggatgatggcggagctccacgccagggggaagacgcccgaggacatccgcgactgcctcaggagcgcgccgctcgacacgcacgtcgtttccgcagtcaagacggcggcggcgctggggtacgcacggcacaaccacaccatgccgaccacgttctcacctgccgctgcagcacttgcgtttgggaccgaccgaccgatgttctttgatgctggcaatggcatggctgctgctgctcccgtttgcaggtgtgacttgaaggtggtgagcgacgccaacaccttcttcatcgagaccgtcctggcgcaccacggcgtgctcggctgcttctccgagatcgtcaccaatccggcgagcgtcgacgcggacggcaggctcaggatctcgccgttccacgaccccgcgtccgcgccgcacggttgcagcctctgccctgacaacatgtgcaagggcaagatactggggaggatccaggcaacaggcagtgacaagaagcggcgccggcgcttcatctacatcggtgacgggaagggagattactgcccgtccctcaagctgggggaaggggaccacgtcatggcaagggagaactaccccctgtggcatctcatctgcgacaacaagcagcttctcaaggctgaggttcatccgtggaacagcggcgaggaactggaaaagacgctgcttaagttggccggcgaagtgatcagtccacctgcacaggcttcacaatttgactacagcaaatgcgagatgagcaatccagcatcctgccctccgtcgtgtgccgcactgattaccgaccaactcttagttcgcaagtactgataaaagtctccatcctgcattcaacatgatatatgtcgtcaatctgcacagcaatttagagatggattatctatgctatacactatgttatcaaataaactgtagcgtggcatggaaggacatgagttgagaattaattgatgccagtgtgggaaactatagtctctaactcctcaggaaaatccaaatttccaacagcagaatccattatgtcagtctgtcagatcaatagccaagacagtaacagcatacggtggatgtggatatgctacaggacggg

SEQ ID NO: 2369 - DNA, 1171 bp, Zea mays
cagatgccaagccaccccggcgagaccaaccggccaatcgcagttcaggaaaaagatgacctgctatccaaacccaactgtataaaatgtagctgctgtgttctgttatgacacagccatcacacgcatactgcatacacaacgcagagcatcagaagcagctgcgatctgatcgacatggctgccgccaccatggctatcacctcccgcgcgctcgtcggcaagccggcggctggcacgagggacgtcttcggcgagggccgcatcaccatgcgcaagaccgccgccaagcccaagccggcggcgtccggcagcccatggtacggtgccgaccgcgtcctgtacctgggcccgctgtccggctcgcccccgagctacctgaccggcgagttccccggcgactacgggtgggacaccgcggggctgtcggcggacccggagaccttcgccaagaaccgcgagctggaggtgatccactgccgctgggccatgctcggcgcgctcgggtgcgtgttcccggagctgctcgcccgcaacggcgtcaagttcggcgaggcggtgtggttcaaggcgggctcccagatcttcagcgagggcgggctggactacctcggcaacccgagcctggtccacgcgcagagcatcctggccatctgggcgtgccaggtggtgctcatgggcgccgtcgaggggtaccgcgtcgccggcggcccgctcggggaggtggtcgacccgctgtaccctggcggcagcttcgacccgctcgggctcgccgacgacccggaggcgttcgccgagctcaaggtgaaggagatcaagaacggccgcctcgccatgttctccatgttcggcttcttcgtgcaggctatcgtcaccggcaagggccccctcgagaacctcgccgaccacatcgccgaccccgtcaacaacaacgcctgggcttacgccaccaacttcgtccccggcaagtgagcgagggcatgatgcttgcatgcgtgtaccgtagacgtaccgtattcctacgtactgcaggttgcaccagtatttgtgaagggagctgtgcgtgggagccagagattgtaccgctagtgtatttttgtatgcacgccgtggagctgatcaatgaaatatgctgtaaatatattatgtcttcatttatgcatactgtaca

SEQ ID NO: 2370 - DNA, 1680 bp, Zea mays
ggtttacagtaaaaaaattccctacaaaagggtacgcaatttgtgaaatttgtgaaaacagcatctccgccgcaatgaagcgcgagggcttggagaccccgccgccgccggcgaagcacccaaaaaattcaagccccacaagtgccacccccatccactccctcacggacgacctcctgctccagatcttcctccgccttccctccctcgcgacgctcgtccgcgccgccctcgcctgccgggcttggagccgcgcggtggtctcctccccggccttccgccgccgcttccgggagctccaccggacgcccctcctcggcttcttcttcgagtgccctagccccgtccaagacccggccatcccgctcttcccctcattcgtccccgtgcgccgccgcgaaggggacctgtccatcgccgtccgcggcggcgacttcttcctcacatgcctccaggagcaccccatcaagtcccagtcctgggacattctcgactgccgtggcgggtacgtcctcctctgtaatgatggccaaccaggtgcgcaagcaatggcggtggtgaatcccttggcgcgacagtgccggtcagtagactatcgccatgtggacgccttggaaggtcgccgtgggactttctttgatctcaacggctacttgctctgctcggaggaggaccccgcatcgtttcgggtggtccttattgcccacgacgagtccagggtgcgggctactgtcttctcctcggacacatgtgagtggcaaattcacccgtgggttgatgtcccagggccaccacggggatcagaaagctggcttctgaagtgcaccatgcaatcaaatgggttcttgtatatggtttacaagaatgacgggtatatggtcacgcttaacacggcgacaatggagttctctgctgaggagctccctcaattgttgaagaatgaacgctgcagcttcagtgtcggagaaacaatcaatggtgcgccctgtattgtttatgctattggcttcactgttggtgtgatgttgagcagcacagatgtggatggcactaagaagtggatgctggacagggtcactaggtttcgttggaatcagaagtgcatgtatgacgggctcctggttctggcagtcagggatggctttgcgtacttggcaacttcaaacaagacctgttttttcgcgaaatcaagttggttctggtccctctgcctgcaaacaatgaaagtggagaatgcgtttcagaggacatatggcactgttgcatacccctatgttatggcatggcctccttgtttagttggtaacaatgggaggtctgcacttgatgatggtatgtagtgcattaagtgccttcaaagtagggaggagatgatataaattagggcaaggggctatagagtataagctgcttgctaaaccaatattagttttttttggggctatagagtataagctgcttgcagaaactatgaaagatgactcgagccattgctagctagtttcatgtaacttacaaaattagtgatgcataagttttcatagcgcaaggagatcgattatagatcagaacccatattgtaagctgtactgtataagatcgtacgtcttttatgcattcttcaggcacctatgacactgattgtttggctttctatagatgttgggtacgttgagcttt

SEQ ID NO: 2371 - DNA, 2425 bp, Zea mays
agcaagctcatcagcattcgactgctccagctagctgcagtgcagagccataccaaagcctgcttgtgttgtgttgtgttctcttctgctcctcgctcgcacgaataatcagttcaaaccaatggacgggaagaaggtgcaggagagggcggcatggggagccagcgacggcggcggcaacctggtgcaggacgccgtcgactacaggggctgtcgggcggacaagtcgagcacgggcggctgggtggcggcggcgctcgccctggggatcgagctgtgcgagcgcctcgccaccatgggcatcgccgtcaacctggtcacgtacctcacggataccatgcacctgcccagcgccgcagctgccaacgtggtcaccgacttcatgggcacctccttcctcctctgcctcctcggtgggttcctcgccgactccttcctcggacggtacctcaccatcgccatcttcgccctcatccaagccatcggcacggggctcctggcagtgtccacggaggtgcggcagctgcggccgccgccgtgcggacccggcgcggctgggccgtgcgagcaggccacggggttccagatgggcgtgctgtacgtgtgcctctacctcatcgcgctgggcaccggcggactcaagtccagcgtctcgggcttcggcaccgaccagttcgacgagcgcgacgcgcgcgagcgcgccgccatgggcctcttcttcaaccgcttcttcttcttcatcagcgtcggcacgctcctcgccgtcaccgtcctcgtctacgtccaggaccacgtcggccggagctgggcctacggcatctgcgccgccgccatgctcgccgccatcgccgtcttcctgtctggcaccaggcggtaccgctacaggcgcagctccgggagccccatcgtgcacatcctccaggtcctcgtcgctgccgcccggaagcggaacatcgccaagcacccgctcgccgtctccgcgctctacgaggaccgccccgagcacgcgcgcatcccccacaccgcccagttcccgtgcctcgacagggcggcggtgatggcaggggacgacgacaacgaggtggggcacgacgggcggccgacgccgaacccgtggaagctgtgctccgtgtcccgcgtcgaggaggttaagatggtggcccgcctgatgccggtgtgggcgacgaccatcctgttctggaccatctacgcgcagatgatcaccttctccgtggagcaggccaccaccatggaccgccgcatgggcggcttcgagatcccagccgcctcgctcaccgtcttcttcgtcggcgctatcatgctcaccctcgccttctacgaccgcgtcttcgtcccgctctgccggagcctcatgaccggccggcaggggctcacgaacctggagaagatcggcatcggcctggtcctctccatcgtcggcatggccgccgcggccatatccgagaagaagcgcctcgccgtcgccgccacaagtggcgtagcagggcatgggtcgctgcccatcagcgtgttcatgctgacgccgcagttcctgctggtgggcgcaggcgaggcgttcatctacacggggcagctggacttcttcatcacgaggtcgcccaagagcatgaagaccatgagcacgggcctcttcctcaccacgctctcgctcggcttcttcctcagcagcgcgctcgtctcgctcgtcaagagctgcacccggtggctcggcgacacaatcaaccacagccgcctcgactacttctactggctgctggccgtgctcagcgttgtcaacctcgtcgcctaccttgtctgcgccatgtgggccacggcaccgaccagcagccaggcggagcagccgcagcccgcgatggtcgccgacgagaaatgctagcaagatatatcagccaccgaacgatcgacctctgttgcaccgatcacttgttaattatgaagggcacaaaatatatattacttgatacgcctaccagtttagaggattttatagttctgatgagtggatgcagtgtcgatgtcatttttcctacatgtcaaaaccaagttcacctctatttattgaaaaataagaaaaatgtttaaatgtaagaggccggtctagcactctagatagtgtggtgtctgagactgagggcttgtttagttgtgtagactagaaatatagttctaattgtgagctgcgaggaagttgttataatttgagaggaagaattaaatggcaaagtaatgatcaacacaaaagacacgacgatatgttttccaaggttttgctctaaagaacgtacgtcccagataaggtttccataaaggacgtgtctctttcaactttttccctctctcacacggtcacggagatcagatgagttttcttcactatcttagggacactaagtcccataaggac

SEQ ID NO: 2372 - DNA, 2592 bp, Zea mays
accttctccatctccatcgccggcctccatttcttgcctcccgtgccagccagtcactctcgtccgccgcagatcgagaagccaccaccaccaccaccaccaccgcatggccatggcagcccagcagcaccggcaccacaagcgccgccgcatcgccctctccccctccccgtccccgtccctcgcgcccatccccggcgcccccacgccgccgctcgactcgctggccgacgagctcctcttcctggtcctggaccgcgtggcccaggccgacccgcgggcgctcaagtccttcgcgctggcctcccgcgcctgccacgccgcggagtcacggcaccgccggacgctccgcccgctccgcgcggacctcctgcccgccgcgctggcgcggtacccgtccgcgacccgcctcgacctcaccctctgcgcgcgcgtccccgacgccgccctcgcctccgccgccgtctccggctcctccgccctccgcgccgtcgacctctcccgctcccgcgggttcggcgccgcgggcgtcgccgcgctcgccgccgcgtgcccggacctcgccgacctcgacctctccaatggggtccacctcggggacgccgcggcggccgaggtagcgcgggccagggcgctgcggaggctctcgctggtccgctggaagccgctcaccgacatgggcctcggatgcgtcgccgtcgggtgcacggagctgaaggacctctcgctcaagtggtgccttggactcacggatctggggatccagctcctcgccctcaagtgcaggaagctcaccagcctggatctctcctacaccatgatcacaaaggatagcttgccttctatcatgaagctacccaatcttcaagagctgacactggtggggtgtattggaatcgatgatggtgctcttgttagtcttgagagagaatgcagtaaatcactacaggtgcttgatatgtctcagtgtcagaatatcaccgatgtaggagtttcatccatcctgaagtcggtacccaatctattggaactggatctttcatactgctgtcctgttactccttctatggtgagaaacttccagaagcttcctaaactgcaggccctgaagctggaaggctgcaaatcatggccaatggactaaaagccattgggacctcttgtgtttctttaagggagctaagtcttagcaagtcatctggagtgacagatacagaactctcttttgttgtgtcaaggctaaagaacctgctgaagctggacattacctgttgtcgcagtattactgatgttttcactagcggccataactagttcgtgcacttccctcatctctctgaggatggagtcttgtagccatgtttccagtggagcactccaactgattgggaagcactgttctcacttggaagagttggaccttactgacagtgatttggatgatgaaggattgaaagctcttgccagatgtagcgaactttcgagcctaaaaattggcatttgcttgaagataagtgatgaaggtcttagccacattggaaggtcttgcccaaaactccgcgagattgatttgtacaggtgtggagttattagcgatgatggaattattcaaattgcgcagggttgtccgatgctagagtctatcaacctatcatactgcacagaaataacagaccgttcactgatttcactctcaaaatgcgcaaagctgaatactttggagatccgtggctgccccagtgtttcatcgattgggctctcagaaatagcgatggggtgcaggctgctttccaagcttgatattaagaaatgcttcgggattaatgatgttggaatgctttacctttcccagttcgctcatagcctccgtcagataaacttgtcatactgttcagtcaccgatgttgggctcctttccctttctagcatatccggcctgcagaacatgaccatcgtccatttggcgggtataacacccaatggcttgacagcaactcttatggtttgcggtgggttgacgaaagtgaagcttcatgaagcattcagatccatgatgcctcctcatacgataaaaaatgttgaggcacgtggctgtgttttccagtggatcgataaaccgttcaaggttgaggtggagccttgtgatgtatggaagcaacagtcacaagatgtgcttgtgcgatgagaatacaggagacctcgagcgtagccgctatcgtggaaatcgtggcatgcatcgtatggatggatgagttgttgttggctggcaatggcatccagaagtgaagtctgatggggggagctccaaactcagcgttgtaatcagtgcgattcggcacaaagataccagcatttgagcagaggtgtatgtatgtcttgatgttgttttatactgctatagatgtgtagatcccattgtttggtgaggtgatcatttgcgaggaagttgactattagcatgtattaagataaaaaggaaagagatgagaaaatgtttttgaaatttagtacgatatgccttgcagtgcctgtatctgttgcattcatatttgtgatcagctggaatgaagtggcttgcattcatgttttata

SEQ ID NO: 2373 - DNA, 105 bp, Zea mays
cttagccaagaatggcttgcctatctccactgtttggttcgtcttgggagaccaccctgatgatgggtgtactgtgtggatgatggcaggccttcttggctaagc

SEQ ID NO: 2374 - DNA, 708 bp, Zea mays
atggctgaacttgcagccagcctggtggttgccccactgctgtccatgttgaaggagaaggtgtccagctctctcctcaaccagtacaacgtgatggagggcatggagaagcaccacaagaccctcatgcgctggctgcctgccatccaagaagttatcgctgacgccgagaggcagacgtctcgccgcggcgtggagaaatggctcgagcagctcaagacgacagcgtacgaggcgaatgaggtctttgacgacttcgagtacgaggcgctccgccgtcgagccaagaaaaatgggcacatcgccaagcttgccattatggcaagggtaaaacttttccctacccacaaccgtgttgcattccatatcaggatgagctacaggcttcgcaggattgttgacaccttcaaggaccttgtggaagaaatgaacacctttggattcaacaagcttgagcccgaggcaacaacgacatggaaggagtggcgtgagacagattctattatcgttgatcctgaaaatattgttgccaggtctagacatgatgagaggaagaaaattgttaacttattggtcaatggtcatgttaccgatggtgatcttatggtcgttcccattgttggaatgggaggactaggcaagaccacactcgctcagctcatctacaacgaccctcaggtcaaggagcacttccatctactaaagtgg

SEQ ID NO: 2375 - DNA, 2115 bp, Zea mays
atcaatatttatataatgaagtttaaaatagagatacgacagatgagcttataaagaaggaagccaactaagcaagaagccagcctagtcatacagaaatgaaaaggaaataagaaagagaaactggcccagtagcgcacgtgcggagaaacttgctaggggaaaaatattggcccagtaagtagcgctactgggcacccataaacccgtcatccaaatccatggctgctcagtgcagaccagcccagatctccctttggcgcccgagatcacgcacacggcattattgccggacacacaaccgggagtcgggaccactcgccccggccggatgccggagctcagacgactacgtgtataaactccggctacacgtcccggcacggcggcaccacaggctgataagcggcagtgggaaaataccgcaccgcacgcaccaatggagaacgccaacgcctcctcttgccgcaacggcgacggcacccagacgccaccgccgcacgtggcgatgcttgcgacgcccgggatgggccacctgatcccgctggcggagctggcgaagcgcctggcccagcgccacggcgtcacgtccacgctcatcacgttcgcgtccacggcgtccgccacgcagcgcgcgttcctcgcctcgatgccgcccgccgtcgcgtccatggcgctgccgccggtggacatgtccgacctcccgcgcgacgccgccatcgagacgctcatgtccgaagagtgcgtgcgcgccgtgccggcgctcaccgaggcgctcctgagcctcaagcagcggcccaccacgaccggccgtctcgtggcgttcgtcaccgacctcttcggcgcggacgcgttcgacgcggcgcgcgcggcgggggtccagcggaggtacctcttcttcccgaccaatctaaccgcgctcacgctgatgctccacctgccggagctcgacgcctcgatccccggcgagttccgggacctcgccgagccgctccgcctgcccgggtgcgtgccgctgccgggcaccgagaccatgaagccgctgcaggacaagtccaaccccagctacagatggatggtgcaccacggcgccaagttccgcgaggcaaccgccatcctcgtcaactccttcgacgccgtcgagccggggcccgccgaggtcctgcgccagccggagcccgggcgaccgccggtgcgcaccatcggcccgctcgtgcgcgcagaggacggtggaggcagcaaggacgacgcgccgtgcccgtgcgtggagtggctggaccggcagccggccaagtcggtcatcttcgtgtccttcggctccggcggcacgctgcccgccgaggagatgcgggagctcgcactagggctggagctcagcgggcagcggttcctgtgggtagtgcggagccccagcgagggcggcgtcggcaacgacaactactacgactcggcgagcaagaaggaccccttctcctacctgccccaagggttcctggagcggaccaaggacgtcggcctcgtggtgccgtcgtgggcgccgcagcccaaggtgctggcgcaccagtccaccggcggcttcctcacgcactgcggctggaactcgacgctggagagcctggtgcacggcgtgcccatgctggcgtggccgctgttcgccgaccagaggcagaacgcggtgctgctgtgcgacggggtaggggccgcgctacgagtgcccggggccaaggggagggaagacatcgccgcggtggtgcgggagctgatgaccgcggagggcaagggcgccgcggtgcgggccaaggtggaggagctgcagaaggccgcggccgagggccttcgcgacggcggcgccaccgcggccgcactggcggaggtggtcaaggagtggacgagtgcagacgacagcgtctactaatcctacactactacgctaaacgcgaatagcctagttaattattcaaagcatttattatgtccattttgctattattgcgggtgcagttattataataaagtgctcgtgtcagagtatataagggcatgtacaagtacaactcacagcacttgctcggttttcaaagtaagagatggttaaaaacttgcatcatacaatcc

SEQ ID NO: 2376 - DNA, 2063 bp, Zea mays
caacatgcatataagcagcagctccgggtcgcgttccccgggctcgtacgagtagaccaccacacacgcgtccgaggtcgaagaacctcgacacatgtaccagtcgagaaggagtacggacgacgaagtcaacatccaagaagatacaatggcggcgacgtcgtccaaggcaacggggccatggagcaggctctcggaggccgaggccgccgtgaaccgtgccgtcgccgggagccacgtggggaggtacttcaagctggacgcgcgcaagagctccttcaccaaggagctccgcgccggcgccgccacgttcctcaccatggcctacatcatctccgtgaacgccgcaatcctgaccgactccggcggtccgtgcacggcgcgggactgcacccccgtggccaccgccaccaactcgacgaccgcggactgcgcagtcgtcggggctaaggctaacccggggtaccagcagtgcctggcgcgcaccaagagcgacctgatcgtggccacggccgtggccgcgatggccggctccttcgccatggggctcttcgccaacctcccgctggcgctggcccccggcatgggcgccaacgcctacttcgcgtacaacatggtcggcttccacggatccgggcccatcggctaccgcacggcgctggccgtcgtgatgctggagggcctcgtgttcttcgcgctgtccgccgtgggactccggtccaggctggcgcggatgatcccgcggaacatccgcctggcctcggcggtcggcatcggcctgttcctggccttcacggggctccaggcgcaccagggggtcgggctcgtcggcgccagcccgtcgacgctggtcacgctggccgcctgctcggacgtggacccggccaccggcgcctgcctcggcggcaccatgcgcagcccgacgttctggctgggcgccgtcggcttcctgatcacggccacgtgcctgggcagggacgtgaaggggagcatgatctacggcatcctgttcgtcactgtggtctcctggatcagaggcaccagcgtgacggtgttcccggacacggcggcgggcaatgccggcttcgactacttcaggaaggtggtggacttccacgtgatccggagcaccgcggggcagctcagcttcggcggcttccggcacggcaacgtctggctcgccctgctcacgctcctgtacgtggacgtcctggacacgacggggacaatgtactccatggcagagtacggagggttcgtgaaggaaggcggcgggttcgagggcgagtaccgcgcgttcctcgtggacgccgggtcgacggtgctcagcgcggggctcgggagctccacggtgaccacctacatcgagtccaccgcggggatccgggagggcgggcggacggggctcacggccatcaccgtggccgcctgcttcctggcgtccctcttcttcggcccgctgctgatgagcgtgcccccgtgggccgtgggcccgtcgctggtgctggtaggcgccatgatgatgcgcgtcgccagggagatcgagtggggcgacatgaaggagggcgtcccggcgttcgtgaccatggcgctcatgcccctgtccttctccatcgccaacggcatcatcgccgggctgggagtctacgtcgcgctgcactggtacgactgggcgcgccacgggtacggcaagctgaggaacgcgctggacgagcgccggaaccaggtggccgccgccgccgccaccgccaccgcgggagaagtcggcccggcggcgcagggcattgtctgagctaggtccgatccgacgtgtaaggccgtagcaggtcatgttgtttatatagtagattgatccctacattattactagctttttagcttggtcctctggattaggagtttgggttggtgctgggccctacgtacccctgtctgtgtatggtaatggagtgggaacagctgaacggacggggcctgctgggagaagagaaggagaataggagattcttgaggtgtttgtactttgaccatcattgcagcgttgtcattgattccctcccttt

SEQ ID NO: 2377 - DNA, 708 bp, Zea mays
atgaacaggatcgtggcggaggcagctttgtcgccgctacggttcgccaacgggagccagccgtataacgagcgcagggatgatacctacggggtggtgcagtgcaggatggacttggatccggtccactgcaccgactgtctcaactacctcattcagaagctgctgactaggtaccctaacaacacgattgcctctgcccgagggacgagctgttatgcccgatatcaaacagatccatttgacgccatattggatcctcctgcagttgtagctccgccgtctccaccatcttgtaagaaggacgccagcagacggcgtctgatcgtcggcctggaagcggccgccgctgctactggcatcttgttcctgttatcccttagcgtccagctgtggttcttctcgcgctggtggcagagaagcaggatcgacaaggacgacatggaagacaaattcaagaacggagccggacccaagagattcagctacaacgtgctagccgcctctactggcaacttctccgacgaacagaagctaggagaaggcgggttcgggtcagtgtacagaggcttcttggccgagctgaacctccacgtcgccatagaaagagtgtccaagggatcgaggcaggggaggaaagagtacgcctccgaggaggttgaggcaccgcaacctcgtgcagctcattggatggtgccacagccatga

SEQ ID NO: 2378 - DNA, 1636 bp, Zea mays
caacaaaacccgcttccaggaggggcgcattattagataaaagactgacgcgggctctgtccgccgatccgatgattcaagataacttgacggatcgcacggccttcgagccggcgacgcatcattcaaatttctgccctatcaactttagatggtaggatagggacctaccatggtggtgacgggtgacggagaattagggttcgattccggagagggagcctgagaaacggctaccacatccaaggaaggcagcaggcgcgcaaattacccaatcctgacacggggaggtagtgacaataaataacaataccgggcgcgttagtgtctggtaattggaatgagtacaatctaaatcccttaacgaggatccattggagggcaagtctggtgccagcagccgtggtaattccagctccaatagcgtatatttaagttgttgcagttaaaaagctcgtagttggaccttgggccgggccggccggtccgcctcacggcgagaaccgaccagctcgacccttctgccggcgatgcgctcctggccttaactggccgggtcgtgcctccggcgccgttactttgaagaaattagagtgctcaaagcaagccatcgctctggatacattagcatgggataacatcataggattccggtcctattgtgttggccttcgggatcggagtaatgattaatagggacagtcgggggcattcgtatttcatagtcagaggtgaaattcttggatttatgaaagacgaacaactgcgaaagcatttgccaaggatgttttcattaatcaagaacgaaagttgggggctcgaagacgatcagataccgtcctagtctcaaccataaacgatgccgaccagggatcagcgggtgttactaataggaccccgctggcaccttatgagaaatcaaagtctttgggttccggggggagtatggtcgcaaggctgaaacttaaaggaattgacggaagggcaccaccaggcgtggagcctgcggcttaatttgactcaacacggggaaacttaccaggtccagacatagcaaggattgacagactgagagctctttcttgattctatgggtggtggtgcatggccgttcttagttggtggagcgatttgtctggttaattccgttaacgaacgagacctcagcctgctaactagctatgcggagccatccctccgtagttagcttcttagagggactatggccgtttaggccacggaagtttgaggcaataacaggtctgtgatgcccttagatgttctgggccgcacgcgcgctacactgatgtatccaacgagtatatagccttggccgacaggcccgggtaatcttgggaaatttcatcgtgatggggatagatcattgcaattgttggtcttcaacgaggaatgcctagtaagcgcgagtcatcagctcgcgttgactacgtccctgccctttgtacacaccgcccgtcgctcctaccgattgaatggtccggtgaagtgttcggatcgcggcgacgggggcggttcgccgcccccgacgtcgcgagaagtccattgaaccttatcatttagaggaaggagaagtcgtaacaaggtttccgtaggtgaacctgcggaaggatcattg

SEQ ID NO: 2379 - DNA, 3386 bp, Zea mays
ccgcgaccccaggtcagtcgggactacccgctgagtttaagcatataaataagcggaggagaagaaacttacgaggattcccctagtaacggcgagcgaaccgggagcagcccagcttgagaatcgggcggcctcgccgcccgaattgtagtctggagaggcgtcctcagcgacggaccgggcccaagttctctggaaagggacgcctgggagggtgagagccccgtccggcccggaccctgtcgcaccacgaggcgccgtcaacgagtcgggttgtttgggaatgcagcccaaatcgggcggtaaactccgtccaaggctaaatacaggcgagagaccgatagcgaacaagtaccgcgagggaaagatgaaaaggactttgaaaagagagtcaaagagtgcttgaaattgccgggagggaagcggatgggggctggcgacgcgcaccggccgtatgcggaacggctcctgctggtccgccgatcggctcggggcgtggaccgttgtcgcccgcgccggcggccaaagcccgggggccctaggcgcccccggcagccgtcgtcggcgcggacggtatccgcgcgcctctggcgcgcccctcggggcgctgcgccgcaacggcctgcgagctccccatccgacccgtcttgaaacacggaccaaggagtctgacatgcgtgcgagtcgacgggttcagaaacctgagatgcgcaaggaagctgacgagcgggaggccctcacgggccgcaccgctggccgaccctgatcttctgtgaagggttcgagttggagcacgcctgtcgggacccgaaagatggtgaactatgcctgagcggggcgaagccagaggaaactctggtggaggctcgaagcgatactgacgtgcaaatcgttcgtctgacttgggtataggggcgaaagactaatcgaaccatctagtagctggttccctccgaagtttccctcaggatagctggagcccacacgagttctatcgggtaaagccaatgattagaggcatcgggggcgcaacgccctcgacctattctcaaactttaaataggtaggacggcgcggctgcttcggtgagccgtgccacggaatcgggagctccaagtgggccatttttggtaagcagaactggcgatgcgggatgaaccggaagccgggttacggtgccaaactgcgcgctaacctagaacccacaaagggtgttggtcgattaagacagcaggacggtggtcatggaagtcgaaatccgctaaggagtgtgtaacaactcacctgccgaatcaactagccccgaaaatggatggcgctgaagcgcgcgacccacacccggccatctgggcgagcgacatgccccgatgagtaggagggcgcggcggccgccgcaaaacccggggcgcgagcccgggcggagcggccgtcggtgcagatcttggtggtagtagcaaatattcaaatgagaactttgaaggccgaagaggagaaaggttccatgtgaacggcacttgcacatgggtaagccgatcctaagggacgggggaaacccggcagatagcgcgatcacgcgcgtcacccgaaagggaatcgggttaagatttcccgagccgggacgtggcggcagacggcgacgttaggaagtccggagacgccggcgggggcctcgggaagagttatcttttctgcttaacggcccgccaaccctggaatcggttcagccggaggtagggtccagcggccggaagagcaccgcacatcgcgcggtgtccggtgcgcccccggcggcccttgaaaatccggaggaccgaattccgtccacgcccggtcgtactcataaccgcatcaggtctccaaggtgaacagcctctggccaatggaacaatgtaggcaagggaagtcggcaaaacggatccgtaacttcgggaaaaggattggctctgagggttgggctcgggggtcccggccccgaacccgtcggctgctggcggaatgctcgagctgctcgcgcggcgagagcgggccgccgcgtgccggccgggggacggaccgggaacggccccctcgggggccttccccgggcgtcgaacaaccgactcagaactggtacggacaaggggaatccgactgtttaattaaaacaaagcattgcgacggtcctcgaggatgctgacgcaatgtgatttctgcccagtgctctgaatgtcaaagtgaagaaattcaaccaagcgcgggtaaacggcgggagtaactatgactctcttaaggtagccaaatgcctcgtcatctaattagtgacgcgcatgaatggattaacgagattcccactgtccctgtctactatccagcgaaaccacagccaagggaacgggcttggcggaatcagcggggaaagaagaccctgttgagcttgactctagtccgactttgtgaaatgacttgagaggtgtaggataagtgggagcctccgggcgcaagtgaaataccactacttttaacgttattttacttaatccgtgggtcggaagcggggcaccgcccctccttttggctccaaggcccggcctcgccgggccgatccgggcggaagacattgtcaggtggggagtttggctggggcggcacatctgttaaaagataacgcaggtgtcctaagatgagctcaacgagaacagaaatctcgtgtggaacaaaagggtaaaagctcgtttgattctgatttccagtacgaatacgaaccgtgaaagcgtggcctatcgatcctttagaccttcggagtttgaagctagaggtgtcagaaaagttaccacagggataactggcttgtggcagccaagcgttcatagcgacgttgctttttgatccttcgatgtcggctcttcctatcattgtgaagcagaattcaccaagtgttggattgttcacccaccaatagggaacgtgagctgggtttagaccatcgtgagacaggttagttttaccctactgatgaccgcgccgcgatagtaattcaacctagtacgagaggaaccgttgattcacacaattggtcatcgcgcttggttgaaaagccagtggcgcgaagctaccgtgtgccggattatgactgaacgcctctaagtcagaatccaagctagcaaccggcgcctctgctcgccgcccgccccgacccacgttagggcgttcgcgccccaagggcccgtgccattggctcagcccgcccggccgacgcgccgcggcgggccgcctcgaagctcccttcccaacgggcggcgtgctgaatcctttgcagacgacttaaaacgcgacggggcattgtaagtggcagagtggccttgctgccacgatccactgagatccagccccgcgtcgcacggattcgt

SEQ ID NO: 2380 - DNA, 3652 bp, Zea mays
caggagagagaaaattcccacacacacaaatggcaacaggagagaaaatctatagagagagaaacaagagggagagagagagagggaacagaagcaccgcgcggccggagacgccaaaaatacatcttcccggtccaggcaagaaatcagaattctccgctgaacaatccgtcgcatttgcgccccctttacggcgaatccgacatggggagggcgggatttctcttcctccccctcctgctcctcctcgccttcgccggccccggccccgcctccgcggcgacggccatgaccccggacgcgggcgtcatcttggacctcgccaagtcgctgaccaacccgccgccgtcctggaccggcaccgacgtctgcggcggcgtctccttcagcggcgtcacctgcaacggcgccgcccgcgtcaccggcatcaacctcgccaagctgcatttatccggcaccctttcctcgtccctcgccaatctcaccgcgctccaatcgctgcagctccaaggcaacgcgctggagggcgacctgccctccctggcccagatgggctccctcgagaccctcgttctcgacggcaacgccttctccaccctgccgccggacttcctcgagggtctcccctcgctgctcaagctcagtatggacgacctccctctcgagccatggagcatccccgacgctatcgcggggtgcgcgatgcttcagaccttctcggcctccaatgcctctgtctctggccccttcccggcggttcttgccaacctgacgtcgctacagacgctgcggctgtcgtacaataaccttaccggggtcctgccggtggggttagaggcgttgggctcgctggagacgctgcagctcaacagccagaggtcgaacggcatgctgtcagggccaattgacgttgtggcgaagttgccgagcttgaagacactgtggcttcagtccaactcgttcaccggcccgatcccggagtttgatcccaacacgcagctggagactttcaatgtcagagacaacagcctcaccggaccggtgccaccctctcttgtagggatcacaagccttcaggatgtggcgctgtccaataactttcttcaagggccaaaaccaaaattcgcagctaagactgtggatattgattctgggaacgggttctgtcacgaagaccctgggccatgcgatccactggtgaccactctgcttggggtggcttcagggtttggatacccattgcagctcaagaagtgggcaggcaacaacccatgcgatccatggcctggtctttcctgcatcaaaatggatgtaactcaaatcaaattgcctcgccggaacttgtcagggcttatttcaccggcttttgcgaacttgactagacttcagcggctggatctgtctaacaatcgacttactggggtaataccagatgctttgacgacactgaaaagtctcaattatcttgatgtctcaaataatcgccttactggacaagtgcctgagttcaagcagcatataaagctgatgactgcaggcaactcgtttggggaatcaggtggtgatagtggagggggtggctccaatgttcggtcctcatcttcaaatcctacaggttcacataactcaaagtcaaatgcgggaatgatcgttggaattcttctagttgtcattcttcttgtcatttgtgttgggcttttcctacatcatcgaaggaacaagaatgtggacaagttcagtcctatctcaacaaagagcccttctggtgaatctgaggtgatgaagattcaggtagttgggacaaatggccatagcaacataagtggttctgtaggctcaactgagctttacagtcattcaagtgctgacaacacaagcattgctgacctcttcgagtcccatgggatgcaattaccgatgagtgtgctactaaaggccacaaacaactttgatgaggactacatcttaggtacagggggctttggggtggtttttaaggggactctcaatgacaagctggttgctgtgaagaggtgcgacagtggcactatgggaactaaagggctgcaagaattcatggctgagattgacgttcttaggaaggtgagacatcggcacttggttgcattgcttggatactgcacccatggcaatgagaggctcttggtctatgaatatatgtcaggaggaacactgcgccagcacttgtgtgatcttcagcagagtggttatactcctcttacatggacacagaggatgacaatagctttggatgttgcccgggggatagaatatttgcatggtttggcgcaggagactttcattcatagggatctgaagccttccaacatattgcttgatcaagatttaagagccaaggtttcggactttggattggtcaagcttgcgaaagatacagataagtccatgatgacaagagtagcagggacatttggataccttgcgcctgaatatgccactacaggaaaggtcactacaaaagtagatgtgtatgcatacggtgtgatactgatggagatgattacgggaaggaaagtacttgatgactcattacccgatggcgaaacgcatctcgtaacgagcttccgaaaaaacatgctcgacaaagagaagttcaggaagtttttggaccccaccctggagctcagcgctgaatcttggaacagcctgctggaggtggccgatcttgctcgccattgcacggcgcgggaaccgtaccagcggccagacatgggtcactgcgtgaacaggctttccagcctagtggaccagtggaagccaaccaacattgttgatgatgacgatgaggagggtgggacaagcgagatgggtcttcaccagcacctagaaatatggagatgcgatgatttcactatatcggattcggattcattcagcgcacacaacacatcaaggaagtaccattgacaattagcgaggcttttttttgtcatacatacatataaatgaggaaccatggtgtggcacatcaagaggctccccagtccccacacgtctggatcacgaacagctttgaaggtcaatgtgccagccagtcaggttgtagttagcgcattgaaaacaaggttacttgataatcagcatcttcattcattgaatgtctgctaaccaggctcaaacttgagagggaagtcatgataccagaaaacttgtgctgtatctagcttagcctgtttatacaatttggtcactttggacactgagaaacattttgttcttgaatggtgaagagggaaaagagatgaaagaaaccatagcttcgccgaaggcgagttctggtggttagttttttaggatgtagagggttgccttttgtgtacaaccaaccatgatttcattattatttatctagtatctgtatttgctctgtacaaccaaccgtcaggattgttttcttcaaatacctgaacgtgcgaaacgatgctaccaaaagttcaagttttgcgttagcatgcaatttttttttttcatactggacgtcttgtactggcaagaaccaataaacaaatgtctaagctttagctttgtacagcctgcaaagcaaaagataagatgaatcagagaaatgtccttaggataccaaagaatatttaatgtaacctaacatatc

SEQ ID NO: 2381 - DNA, 1996 bp, Zea mays
atgtcttcgaaattctctttgaagggcttaatgaaaagttttacatggaccgacatgcaaaacctaaagccataccctcttaaaaaagctagggatctgtgaacagtgtacaggtcaaaacaaaagaaagaaaaaaaaacaaaaaaactacacacgacgtcaatcactctcactgcctctttccaccctgctgtagactcccctttctgccgatatatacccagcacacgatgccgcgaccgatcggtttccctcccgagctgcacacacgcgagcacgcgcccgcactgttcgctcgctccccatctccacacccgccgctctccacagtgctgctatcgagacgtctttctccgattgtatgtaccgagctcctcctgcctgcctgcctgcagtctgcctcatccccttctgttttgcttgcacttgaatagccaccttctgcttcgcgccatacgtatatcttctcttgcggtagctttattgcacatcctgcgggccttcttgcgtggatgctcccctcttggctatttgtttgtttcttgcagaggaattttttcctgaacttgtcctcgccgtcttgaaggtttcttgtttgggagcaggcggaggcgtttctttccttcttcgccggcggcggcatggactgggcagcggcgtccgggtctccgtcgtggggcgcggcggcgacggaccccggtccgaccatgctgtccttcgcaggcccgtcctcctccgccgccgacgccgaggtgcggctccaggatttcgccgcgggtcttgcccagagctcgcggccgactggggcggcgccgggagccgggaggaggtcccgcgcggccgtgggaggtgccggcgcggaggcgtgctccgtcgacggctgccgctctgatctcagccggtgccgcgagtaccaccggcggcataaggtctgtgaggcacactccaaggcgccggtggtggtcgtcggcggacaggagcggcgcttctgccagcaatgcagccggtttcacatgctgtccgagtttgacgaggaaaaaagaagttgccggaagcgtctggatggccataataggcgtcgaagaaagccacagcatgatctgacaaatctagggggtttctttccataccaccaagtgaatcagtttgagttctacccacaaacaattccaacagttggccagaattcggacgccgtgcacttggtgggccgtcagcagcctttctccatatcgttctcaagaacaccagacgagttccctttcccacagggtggcggtagcagtgtgctgcaccacctccatgcagcccgccctggccatcacgctgaaggcagcagccacactggaagcagcacacgcgacaacgctctctccggcacactgggccccgagtgtgctctctctcttctgtcatcgtcgctgcgtcgcccctcaactgctggcgtccccgccgttggccaaccccaggttactgcctcttcgaccactgccgtgtcgcaggctgcaacggcagctgtggccactgctgcattcgcggccagtgctggccaccatgtgtttgttcctgatgctatgtttgaggatccatcacaggcactgccattctcttggcagtaggattgttttgttgtcctgtttttatgtgctcctgttgtgttctcgatcgatactctagtgtctgatggctgggaattcggggtacctgtgcacttgcagactcaggttgtggtccgtcagagatgtatacaagtgacacgacgactagtgctggcatctgaaaggaagtggtagctgctgtgcagagtgtttagccgttaaattcaaatgcgcccgttcaatttttttcttcgttttccttgtatatatttgtttgtttttttttgggcaaaaatatgtgcatgttatgcacttctggaatcgtcgaatcaggctgcagtcttgaaagccttcatcagggatccaaaacgccagatggctccatttgataagggtcc

SEQ ID NO: 2382 - DNA, 1586 bp, Zea mays
ctggtctataaataaatggcgcatggcttagcatgcaacagagcatagtgccagagtgtgcgctaggaagtatacccgagaaatggatgctcatgccgtggatatcccttccctagccgaggagctgaggaaggagctagctaccgcggacgctctggcggcgcggtccgccagtctctaccccgtcgtcatcgccgaggtcggcccgcgcactcgcaacgtctgcccggaggactacgacccgtcccacgtctccattggcccgtaccaccacatcaagaacccaaagctcgtcaggaagcaggacaagatccggagcctcagcaccgttatgtcggcggcggcgagagtcgacgttaagtcctacatcgatgtggtcgcgggcatcgaggccaaagccaggagctgctacgccaacacgttcgataaccacatagatagcaacgactttgtgcgcatgctgctgctcgacgcatgctacgtgcttgtcaatttcggcggcatcggcggcggcgggcaccgcggcagcgacatgatggaggacgtcggggtggtgcgcgacgtgatctacctcgcggagaaccagataccgttcttcgtcgtcgacgagatccgcaagctcaccattccggacggcggcggcggttctgcgcctgacgcgattacgggctacgtccggaagctcctgcgggagctgcagtactcagtggcgacgccggcggtggctgaacctccggggccagacaaccttctgcatctgctgcacatgcacctgatgcccaccgtcgcactcccgtcgtcacgatcgaccgtaggcaccggcaagccgcgtcggttcggccggtggcgctcggcgacggagtactactgtgccggcgttggattcaggagccggcctctcggcggcaaaggggctcgctcaatcctcgaggtgaagctcgactactacggccgcacactggagatcccccacctgaagatcgacgccgagacgtcgcggctcctgcgcaatctgatggcgctggagcagagcaacccggaggaggtgggcagccacgtgacggcgtactgcgtcttcctgtcgcagctggcgggaacggtgcaggacgtggagctgctgtccaggcgagggatcatcgcgcacggcctcggcagccacaacgaggtcgccacctccctggcgaacctctgcaagggcatcgcgttcgggggcgacgaccccgagagcaactaccttcgtgcgacatgggaggggctggaggagagcttccggagccggccgcgccggtgggcggcatggctgatgctcaagtacttcaggaacccgtggctcgccgtggggctggcggcggccggcgtggggctggtttgtaccgtggtgcaagcagtatacgctgttttggcttacacatcaaatccttagcagtaattcgtagtcaaacactgtgcggctgtgctgtgcttgtgaaaagtagtcaatattggtgtgcctagtacgtccagcaatgatttcgttactattatctaatcgatgcatcaacaaaaattttagtcgaaaatacaaataactgtgatttgttcttacg

SEQ ID NO: 2383 - DNA, 1089 bp, Zea mays
atggttttggagactgcagggggtcacggccgcaaccccaatggcatcctcggccttctatgccgggaacactttcctggacttgtcgagtacgccggagtgacgagcccagcatacaccttcgaccactacgctgtcgcccccgatgcagtagatcgggacggcagacaattcaacaacaaggcggagcgggtgaagcaagagctgtgggatttcttcaggtgcgatgctggatacgaggccagggcggatgtggtgtctacgacgtgctgtaagaagctcgtcgtggacatgcactacgaggcgcgcatccaggccatcgtcacttaccacggctccgtccttggggagaaggtgaacaagaaggacgcccgaaccatgtcattgactgcggaccagtacttgcagtgctgggagaagatggtgcagaggtggtgctcggctgagtgggacgaggcgcacaacgctagccgggaacggcgtttgctgatgcaaggtccctcccaccatcaaggcagccgcagcctgggcaaatacgcggaagcatggtcggcggcacatggtggcgcgccttgctccacgttctcggcatatgccatggcccacaaggggaaggcgacgtccgacgtcacctacaacccggatgacgggcccgaggcgtacaccaaccccgccatccacagccgactcagtgagtacaccgccatggccaaggaggtccatgggccagattacgatccgaggaccgaggacatcgacggagatgtcctcatgagggtcggaggaggcaagaggcatgggcggtactggattgccgacggggcaatcgactcgtcctccactcccactctctctcagactcagctagatgatgagaggaggcaacgtgaggagctggagaagaggatggcggagatgttcgcgtacatgcagagccttggcgccgcacagggtcatgctccaccacctccgttgttccctgcagctgaccctacagagttcactactcctggtcaatcggcggcgtcgaacaaccctcatgcttcgtccagcccttcgccgaaccagtccagatgcccacctcgttga

SEQ ID NO: 2384 - DNA, 2265 bp, Zea mays
cgagcagcagcagcagcagcggcggccggagcccggacggagccaaccgccagctagtctgtctgccgcgccggcccgccgctcgctcccgctccccctcccccgtccgaggatcacgtcgcgcctcgctcgcggtctcgtccacagctcccggtgcggtcggcgatggacgctgccggggacgccatggagagaggcgaccgcgcgccgctcctgccagtgagtcaaggcccaaaggttcgggacgacgacagcctccaagtgccactgttgaaggataagaaacgtgccggcagcaaggcgccggcggttgttcttgggttcgagtgtctggagagcacggcgttcaacggcatctccacgaacctggtggtgtacctggagaccgtcctccacggcagcaacctggccagcgcctccgacgtcaccacgtggttcggcaccagcttcctcacgccggtcttcggcgccatcatcgccgacaccttcttgggcaactacaacaccatcctcgtctctctcgccgtctacctccttgggatgatgttcgtcaccttctcggcgttcctgcccacagccgcggcgctcggcggcgccacctcggtgttcggcgccaagaccgtcgccttcctcgggctgtacctcgtggcgatcgggcgcggcggggtgcagtcgtcgctggcgccgttcggcgcggaccagttcgacgacgccaacccggcggaccgggacagcaaggcgtctttcttcagctggttctacctctgcgtcgacttcggcatgatcgtctccggcctcgtcatcgtgtgggtccaggacaacgtcagctggggcctcggcttcggcatctccaccgcctgcctcgcgctcgccttcgccgccttcgtgctcgccacgcccatgtacaagcgccgcatgcccaccggcacgccgctcaagagcctcagccaggtcgtcgtcgccgcatgcaggaagatcgccctgaaggcgcccgccgacgccggcatgctcttcgaggtcagcgacaaggtggacgccgcccagcctaagatcgcgcataccgacgagttctcgttccttgacaaggcagctatcgtctccgaatcggacatggaggagatgtcgtcggaggaggcctgttcgtcgtcgtggaagctctgcaccgtcacccaggtggaggagctcaagatcctgatgcgcctgctgcccatatgggtgactagcgtcatcgtgtcctcggcgtacgcgcagatgaccaccaccttcatccagcagggtagcgccatggacatgtccatcctgtccgtgccggtggctgcggcgtcgatgggctcgttcgaggtggtcttcctcctcacgtgggtgctgctctacagcaaggtgatcgtgccggtgctgaggggcttctcctccggcggcgacggcgagccgtcccagctgcagcgtatgggcgccggccggctactcatggcgctctcgatggcggcctcggcgctcgccgagatgaagcgcctcgacagcgccgcgcgaggcgaggagatcaccatcgcgtggcagctcccgcagtacttcttcatggccggcgcggaggtgttctgctacatcgcgcagctggagttcttctacgccgaggcgccggacaccatgaagagcacgtgcacgtcgctctcgctgctcaccatcgcactcggcagctacatgagctcgttcatctacgccattgtagcggcgttcacggcgacgcccgacagtcccggctggatctccgacaaccttaaccaggggcacctcgattatttcttctggaccatggctgccatgtgcacgctcaacttcgttgtgtacagcgggttcgccaagaactacaagctcaagacggtgctatcatgacgcaactacaagattgctcaactcgcctccatcatggtcttggagattccactgcattttgtttttgcacagttgcaaattggtgactggtaaagggtaactaggatgcaaacagcgggctagcggctcaaccgctcaacggctcgtatatccatacaaacggacagcggtacagtacaacagtacgtaggataggaagaagatgcagtcttttttttcccttctttttctttgaagaagaaactgcacagattcctgtggcagcaactattgttcttttgaaagttgaaactgctgttttgtttttccttcatacggagatacaattcacagagttcgaggatgacaagacatcaatgtcaatgtgtttttttc

SEQ ID NO: 2385 - DNA, 3240 bp, Zea mays
cttactccggtgccggtcggccgggtcgtgcgtgcccctgcccccctccggcctccggctcccagctttctcttcataaatacgcggccgtgcgtcccccgaacccccgcacctcctatccgctccccactcggcgtctgctgctgcattgccgtgccgccagtggagaggagatcagtgatcgttggccactgcactagctgcacgaaggtactcgatacttgttgagagagagagagagagagtgctgatcaccggccgccgccacttctactgggagttttttgtccggtaaatgactggaggccttgccggcgtcgtcgtcgcggtacaggtactgggtccgctctcgttcttgacgtgcctactactatcgtccccgtcgccggagttgctgcgtggtcgcaccggagggtttatcaacgaaggtacgcgtgtacgtacgtacgtacgtacatgcttattatattaatccgtcagagttaattagaggtaccgacgatgatctcacagttgccatcaagttatctgtccgtcgtgcttaatctgcgatacgactaggaacggaagtgtaggaatcgctggtctgtgtaagagtacgctccctgtccctgcactgccgcgctactataccatttgccgagcctactactatgcctataccactgtatgcgcgtgcatggtttacacgatgctttggcctgacgcacaggtagctgcttcgtttccggaagcagtgtgttgtctggtattgatacgtgcagagacagagagcagcagatcatgccaagagagccagctgacgacgacggcatacgatggccggccgtctctgcttgtgttttcccgctagtgctagtgcacttgattcaggggcagaaaaaaaagacatcgtcttttgcattgctcagcttcgttatactttaatacaattaatcaatagctgtatgtcgatctaaatcagagttaggaagcgttatatgcttatgagtgtgggaagcctactgcactgagtaatctattgctacttggtcgtccctaacgacatgagacatggcatatcacattcacaggttaaacaaatcttgccggctcaacgcttcgttaggagaagacggaagactgcagaaactcctgaggaggaggacgcggggaataaaatcgagcgataaaaaaaggctgatggatgctaccactgttgattccaaatggatctctcccgccactgaagatgggtccatggacaggcgaggaaacccagctgtcaagacaaccaccggaagatggagatctgccatcctgctgctagctaactatgggctcgcgacgtgcgccttcttcggcgtcggcgtgaacctcgtggtgttcctgcgccgggtgctccaccagggcaacgccgaggcggccaacagcatcagcaagtggactgggaccgtctacatcttctcgctcatcggcgccttcctcagcgactcctactggggccgatacgtcacgtgcgccgtcttccagatcatctacgtgatggggctggtggtcctgtcgctcgcgtcatggctcttgctggtgaagccgtccggctgcggcggcgtcaaggcgcactgcgacgggccgtcggcgcccggcgtcgcgctgttctacctgtccacctacatgatcgcgttcggcaacggagggtaccagccttccatcgcgacgttcgggtcggaccagttcgacgagacggaccccgaggaggcgcgctccaaggtggccttcttcagctacttctacctggcgctcaacgtcggctccctgctctccaacacggtgctggtgtactacgaggactcggggcggtgggtcatggggttctgggtctcggcggccgccgcggcgctggcgctcgtgctcttcctgctcggcacgcccggctaccgccacttcaagccgagcggcaacccgctcacccgcgtcgcgcaggtgttcgtcgccgcgctgcgcaagtggcgcgccgaggtcccgcgtggcgagctcctccacgaggtggtggaagcaggagaggaccctaaggtctcgggcatccgcaagatccttcacagcgacgggctcaggttcctcgacaaggcggcgacgatcacggaggaggaggaggaggagggtccgtggcggctctgcacggtgacgcaggtggaggaggtgaagtgcatcctgaggatgctgcccatctggctgtgcacgatcgtgtactcggtggtgttcacccagatggcgtcgctgttcgtggagcagggcgccaccatggacaccaacatcgggtcgttccacttccccgccgcgagcatgtcgctgttcgacgtcctcagcgtgctggcgttcatcgccatctaccggcgggtgctggtgcccgtcatggcgcggctgtcaggcaacccgcagggcctgaccgagctgcagcgcatgggcgtcgggctcgtgatcggcatggcggcgatggtggtggcgggcgtggtggaggtggagcggctgaagcgcgtggcggccccggaccagccgagctccctgagcgtgctgtggcaggtgccgcagtacgcgctgatcggggcgtcggaggtgttcatgtacgtggggcagctggagttcttcaacgggcaggcgcccgacggcgtcaagagcttcggcagcgcgctgtgcatggcgtccatctcgctggggaactacgtgagcatcatgctggtgagcgtagtcacgagcctcaccgccggtgagaagcgtccggggtggatccctgggaaccttaactcaggacacctcgacaggttctacttcctcctcgccgctctctcgctcgtggacctcgccgtctacgtcgcctgtgccatgtggtacaagggcatcaagcttgacggcggcgacggcgataacaggagaaaggtctctgcgcacgtctagctagccactgcatactggacctcgggccttcagttttcaggttcagagacgtgccgggctggcccctggccgtatgcccgtatagtcttatagagagaggagagagagagagaggaaataaaatgtcaaagaatatgtaaccatccgctcggcgttggatggcccatgttgttatgtatctttggtcagatgatccaagtaacctcatgtgaagtactaatgcaataattatatatggatagtacactatctgtgccttaggacggcacgtaattatatttaatgatgagtgattttagtaaaccattt

SEQ ID NO: 2386 - DNA, 765 bp, Zea mays
atgctgtcctcgcacccgctcaccccgcgttgcctggcccgcctcctcgcgctcccgctcgcgccggccacctccatgctcctcctcgactggtacgcgtcgtcccacccggcgctctcgctctcgtccctcccactccgccccatcctcgcggcagccgaccccgaccgcgcgctcgtgctcctcgactccctgccggcctcctgcctgcccccgctccgcgactccctcctgctccgctccctgccccccggccgcgcgctccacctgctcgaccagatgccccgccgcttcgccgtcgccccctccttccgctcctacaacgtcgtcctctccacgctcgccagggccgactgccacgccgacgccctgctcctgtaccgccggatgctcagggaccgcgtggcgcccaccaccttcaccttcggcgtcgccgcgcacgctctgccgcctcggccgcgccggcgacgcgctcggctgctccacgggatggcgcgccacggatgcgtgcctgatgcggtgctctaccagaatgtcatccacgccctagtcgcacagggtggggtcgccgaggccgcgatgctcctcgacgagatgttactcatggggtgtgcggcggacgtgaacaccttcaacgacctggtgctcgggctcgggcgcgtgcgagaggtagccaggccggtggacaggatgatgatgcagggatgcatgccaagtgcagtgacatatggtgttggagacttgttctcaagtgctaggagttaa

SEQ ID NO: 2387 - DNA, 2463 bp, Zea mays
tcttcgatctaatcgctgcagaggggagatggagagccgttctatctccagtagagaagtcattcggacatgtgggccacatctccaccgccgctcccactccagctccggcgaccgccgcatcctcgcttcatcgcccgccgccgtaacaagcggctggaccgcatcgcggcctcacaggacccgctaaccgcgctgacccgggtgctgtggggaggcgcgctgccgccggcgcagctcgtcgtcgccgtgcgccacggctggaccacggcgtggcagctcctgatgcggcagctggcgccgtccgaccccgcgacgggcggcttcgcccgtgcccctgcccgcttccccgccgtcgtggggaagcccagctcccggctccacctctacgtgggcctcccctgcccctgggcgcaccgcgccctcgtcgtccgcgcgctgctcggcctcgaggcccgcctcccggtctccgtcgccgtccccggggacgacggcgcgtggtccttcacgcccggcagccccgacctgctctacggcaagcggaagctccgggaggtgtacgccctgcgcggcggcgggttcgagggcagggcatcggtgccgatgctttgggacgccgagcgctgcgaggtggtctgcaacgagagcatcgagatcgtcaagttcctctgcgacctcgctggcgacggcgccggtgacctcgacctgtggccgccggagctgcgccaggacatcgaccgctggtacagcatcatctaccccagcgtcaacaacggcgtgtacaggtgtgggtttgcgcagagccaggaggcgtacgacgccgcggcgagcgagctgttcggcgcgctcgacaggctggaggcccacctcgccggctgccgttacctgtgcggggacaggctcacgctggcggacgtctgcctcttcacgacgctcatccgattcgatctcgtctacaacacgctgttcaggtgcaccaggcggaagctggccgagtaccctagcctccatgcctacacgcgcgacatctaccagatgcccaaggtcgccgagacgtgcgacatggaggccatcatggcaggatacttcaagacactcttccccctcaaccccggcgggatccagccacacccgccggccacctgcgatagggagtcgctcttgaggccgcatggtagggaggccttgtcctctgctgctggcacgccgcttgaagcagctgcggtttcataattcattcaggctttgaacaaaacttctgaaactgcagaaagagtttatagttctaccagatactgatgcttcagcttcacaggatcaaatcacatcgcagtaactgccatgtgcaaattcttattttgtccatataagtcactggttaattatattggcaagatctgtgctgccaatggtgattatgatagtctctttggatgaagatatatttggttctgctcagtgtacctaaactagaatacttagtgtaaaaaatcgctcatgtttgaacatgtaaataaattttgtaaagcagttgatcagttgtataatggcatgtgttctgttcaatagaatccgttacagagacatcttttgtctgtgcttatatacatcagaactgtctgcaaatgaggcttaattctttatgatatgtttgtctaaccgatgctatatccacgattgctatgtcagaataaccttggcatttatatggttgtcagaattcatgttgtatgtagcacttgattctggcacaaaagcaaaattaatcaacatgcaactcacttcaacctccagaatcaaatttaacaaaaatatagtagtaatttaagtggccagttccgtttatttctgtgtttgtgcgaagtaattgcccagaatgcacggtccagatggtatcctgactcctgaggtagacgtccacagccgatccttgtcgattacagagtttacctgcatgatagtgaaaatctgcatcataacgaaatattcgaatgcccattcacattgcgtggattgtttacaaatacgatgtgtgctcaaaggtgaagaagacagcatctcaaattttacctccaaatacctctattacagcaatgctatgtcgccgccattgccttccataaacagcttgtgttctctgatgtattcaattacttcatcactagtgagatactttatcgatagagatcttcttatgcagtctctgaatctggatgaactgatctgatttggcacaatctcatcaaccgaaataatgttatcctggaaaggagctcagaaatgatcgtatacaacaaatgtcagtaaagaaacttttcctgcttccattaaaatcctcagacaacaagtttgtaccctgcattcttgcaatatatcgctgttgtctatcaattttccaacatcctttccttctcgccgtatgcatacgacaccaaagtcctggcatatggttctgacctggaa

SEQ ID NO: 2388 - DNA, 1918 bp, Zea mays
atgggcggaggagggccgcacagtgcagaactatcagctcaatcacgtcgtcagggagcttcggaagtacagtcgcttgaaacacaccatggagatagatcggtcacacatcgttttctgctttacagctatcactttctaagattatcggattggattgctacactgggagcaatatatgatggtccaggaatccaggattactctaatgccaatgatatgcagcttgcacttgcacatagaagaaactgcacttacctcgatgggaaggattttgttgattttggaagcattgattggggaagactattgagaaatcatggcatttctgattctgaaaaggtgctcattttctttgatgaccaccaaagtgagttgaaaaggttaaagcaagcgctaaaggctggattcaggcatctcatatttgaggacaactatgatactggtacatgtgaccattatttcttgaggcatatctatgatccgtcatatatcagaggtttgtggattgtcaccttagactctaaatgtccatggcgatcccctggaggccggatcggtgattggggacttggaggcgtgggctgctgctggggtttcggtggaggctgccggcgtgaagcattggccaccgagtgctgcacgccaacagccaacagggggtaccgtgcaggtgggcagaagcagccagcgacaacagtagggcacagggatttatatggaccttccaaatacactagacatttgcaagcaaccaaagatactctcagacaagaaggggacataactcctccaacagggattaggcaggctatggagatgcaggctgaagtagaaaggagaatatgtgcccaatttgatcatctgctttactgcagtcgagcagcggaggaacccggcgctcaggggacagccaaccgtcgtggtgcagtacaatggctggaaaggcggcggcttgattgccgtcagctacgaggctcgtggatttggtccatgcgcggagatgaggccaagagggtctgtcctggtattaatcttgttcaggtcccagtggcgcgtggcaaggctaaccttaatctttacagaagtgctggtgctgaggttgttgcaatccttgcaagcaaagggaagtgcgagcgggcatccatcgacgaagtttatcttgaccttactgatgcagcaaaggaaatgctcttacaagctcccccagattcaccagaggggatttttatggaggcgacaaagtcaaatatcttgggccttccggctgatgccagcgagaaggaaaagaatgtgagggcatggctttgtcaatcagaagctgattaccaggacaagttactggcatgtggagctataattgttgcacagttacgagtcagagttctggaggaaacccaattcacatgctctgctgggattgctcacaataagatgttagctaaacttgtcagtggaatgtacaagcctgctcagcaaacagttgtcccttcttcatcagttcaagacttactagcatcactacctgtgaaaaagatgaaacaacttggtggtaagcttggaagttccttgcaggatgatcttggggttgagacaattggtgatctcctaagttttacagaggaaaaattacaagagcagtatggagtaaatactgggtttgaccatataatatatctccctactactatataagcatggtgtgtaatgggtttggaaaaggttctggacggacacatggtcaaagtctgcaatgatcagtacagtttgactgacaaatatactgatggttggctgtcttcagattgtagaacaactctttttaaataaacacctcaaggagtaaagctgacacccatccacgatcatcacgctgcttgtgacgatcgtcgttctcttccgtcgctaaaacgtagtg

SEQ ID NO: 2389 - DNA, 1131 bp, Zea mays
atggccgtcatcgcctacaggcgtgcggtgctcctgcacgggcaccagaggagccgcacggctcgcgccctcgacccctccgtcgtcgctgtcgcatcacatggtagggggaggaggaggacatggccgtcatcgcctacaggcgtgcggtgctcctgcacgggcaccattagtggtcgcaatggtggtagacctcaccctgcccccactccatctcgtagtggagcagttccatcgtcggagaaggcaaagatccagccaccaagttctaccaccactgcgtccaggtttaagcacagtactgcttcgtggtggaacgacgcctctgtccggctgtatgcagtactgcttcgggaaactcggtatcgtcagagatatcttgatctaatggtaaaccatgaagtgaggcatatcttcaagacacgatctaaagttgtctcgtttatccggaagtttcttgatgaccgtgaatttttggaggtggagactccgatgatgaacatgattgctggtggagcagctgcaaggccttttattacacatcacaatgaattaaatatgaggctttttatgcgcattgctcctgaattatatctgaaggaattggttgttggtggattggaccgtgtttatgaaattggaaaacaattcaggaatgaaggaattgatttaacacacaatcctgaattcacaacttgtgagttttatatggcttatgccgattataatgatttgatggagcttactgaaaccatgttgtcagggatggttaaggagctgacaggtggctataagataaaatatcatgcaaatggagttacgaactcaccaatagaaattgatttcacacctcccttcagaaggatcgatatgattaaagatttggaggctatggccaatctcaatataccaaaagatctagcaagtgatgaagcgaaacgttacttgatagaagcatgtgctaagtatgatgtgaaatgtccacctccccaaacgacatcactgcgtccaggatcactgttgcccattgaagaaccactactagaattagaaaggccaccaattttttcagcaccattattttccagcttcattgtacctgcacaacaaaataaggtgctacttaactga

SEQ ID NO: 2390 - DNA, 887 bp, Zea mays
gctgctgggtttttacacgagaagtggcggtagcgtttctggtcccgtcgtcggcgagctagttgcggttcggtttccgcatggtgatgtgcaaggcggagggcgcgcggtgccggcggcaccggcagcagggggcgggcgtctgcgcgtgctgcctgcgggagcgcctgtcccacctgtcgctgccgccgtccgtcgtgcgcggctgcggcgaggaggagggatacaggcacagcagataccacgaggaggaggcatcgtcctcatgctccgaggtgtccacggcctactcctcggagggctccagcgtggcgtcggcgtcggagtgcgccagcccggcgcccggtgagccgaggttccacgacgaggtgaggcgcgcggcgcgggtgtcgttgctgatgcggcacgagcgggtcgtcggggacgccgacgccgtggcggcgttcctcctggcgaggaggaggaggaggacggcggccacgagcttctgggccaagctgctgcacgcggcgcgggcaggaggagggaagaaggatcgagggtgctcgctggccgcgcccggcaccaagacgctcgaggagagggccgccgcggccaagtgggtcctcttctgatcgggacatcctagttgccgcatctgccatgcatgcagatgcaggcaggccgccgctcctcgctgcgttgttctggttccgtcgatcggtcgatggcttcatttctagtcttctgcgaacatttttttctttgggttcttttggtgcattttgttggtggctttcgcctaggtgtcaaagtggcatgcagctaggctatcgaaaaatccatatgttttgtgcagatctaaagctaagaacttgtgcttcttgatccgttgatcgatattcttt

SEQ ID NO: 2391 - DNA, 716 bp, Zea mays
gattgtccgcgatggatcatcaagatgctatcgtcctcaagctgcttgatgcaatggtactgatggagcagcgcttgacagctgctctggctggccgtgatggcgagcaggccgacgcggatggccctgtctccgcctccatggtggatcgggaactgcggttcgacgagttgaccttcaacgacgaatcggcaccgcatcacctcacgcccatccacgaggccctcttctccgacggcgctgaccccttcttcggcgaggagctcgacatcctcaccacctccgagttcgacatcgagcagtcgtctgtggacacccgatctctgcgcacgccgccctccgcaggagagttcgagcgcgtcgaggacatgccggggttgcgacacctagtcgtgctcagcgaccgcgctgtcgccgatgtttttgtcgcgtactccacgctcaaagtgtttgatcaaatgcccaacccaggtttcgatggaggtcctatctttgacgaggaacctgtcttcgagggagagccgtttccctccaccactgactacatcgacgcgctgcgcaacgagatgaacgagttcaagagcaagcgcgacgacgtcaagcgcatggtcgacgccgccgagcgccagggcatggaggtcaccagccaggtcaggtgcgccctgctcgaggacgccgccgcgcggatcgtcgacgagtaccaggtgcacccgtag

SEQ ID NO: 2392 - DNA, 2424 bp, Zea mays
aggtaccgactggtggcggcatgacgaacgaaacatgcatatgcattcgtcccctcgtcgtcgttggcagctctcgctcctctataaataccagcgccatccgcttcagatgagcatcgatcccagcaacgcacggagcgtacgtacattgcagtagctagctatagctggccggccatcccctctcgctcgctgctaaacacgttccagcttgtttgctcagagaaacagcgcgcgcgcacacacacacacatcatcatcatcgattcatcgtacacaggatcagagagcttaattagttctagctctgctgcatgccccttcgacaacgtccgacgatgggcggcggcggcggcggtgtagctaagatgccggcaggccagctctggttattactgctaggcgtgttgttgttagcatttggagtcccagcccaggcctccaggaatactcactacgacttcgttataactgagacgaaggtcacccgactatgccatgagaagaccatcctggccgtgaacgggcagttcccggggccgaccatctacgcgcgcaaggacgacgtggtcatcgtcaacgtgtacaaccagggctacaagaacatcaccctccactggcacggcgtggaccagccgcggaacccgtggtccgatggcccggagtacatcacgcagtgccccatccagcccggcgccaacttcacctacaagatcatcttcaccgaggaggaaggcacgctgtggtggcacgcgcacagcgaattcgaccgcgccaccgtgcacggcgccatcgtcatccaccccaagcgcggcaccgtctacccctaccccaagccgcacaaggagatgcccatcatcctcggcgagtggtggaacgcggacgtggagcagatcctcctcgagtcccagcggaccggcggcgacgtcaacatttcggacgccaacaccatcaacggccagcccggcgacttcgccccgtgctccaaggaggacaccttcaagatgtccgtggagcacggcaagacgtacctgctccgggtcatcaacgcggggctcaccaacgagatgttcttcgccgtcgccgggcaccgcctcacggtggtcggcaccgacggccgctacctcaggccgttcaccgtcgactacatcctcatctcccccggacagaccatgaacatgctcctcgaggccaactgcgccaccgacggctcagccaacagccgctactacatggctgcgaggccgttcttcaccaacacggcagtcaatgtcgacgacaaaaacaccacggccattctggagtacacggacgcgccaccctccgcggggccaccggactcccccgacctgccggccatggacgacatcgccgcggcgacggcgtacacggcgcagctccggtccctggtcaccaaggagcatccgatcgacgtgccgatggaggtggacgagcacatgctcgtgacgatctccgtcaacacgatcccctgcgagcccaacaagacgtgcgccggccccggaaacaaccgcctcgccgcgagcctgaacaacgtcagcttcatgaacccgaccatcgacatcctcgacgcctactacgactccatcagcggcgtgtacgagccggacttccccaacaagccgcccttcttcttcaacttcaccgctcccaacccgccacaggacctctggttcacgaagcggggcaccaaggtgaaggtggtggagtacggcaccgtcctggaggtggtgttccaggacacggccatcctcggcgccgagagccaccccatgcacctgcacggcttcagcttctacgtggtgggccgaggcttcggtaacttcgacaaggacaaggaccccgccacgtacaacctggtcgacccgccgtaccagaacaccgtctccgtgcccacgggcggttgggctgcaatgcgcttccgagcggcaaatcctggtgtgtggtttatgcattgccactttgatcgtcacacggtgtggggcatggacactgtgttcattgtgaaaaatggcaagggcccggacgctcagatgatgccacgtccccctaacatgcccaagtgctgagaaaacaagggcacgagctacgactgctcgggttgcatgcaaggcgctcgatcaaaccagctaatcttagttgattggttgatttaattatttgtggtacatattttaagtagaacggttcttcaaataaaacggccagttgagatgtaattagtgtcatttgtgttcttttctctttttattcatttgattgtaagagaaaaacaaattcattatatttattatttgtgtcggtctactgctagttcaatctccaagtgtaattaaacaatgtatgtcaaatcatgtatctagtgaaaattcaatataaatgcgtgcttcatatgtgtatttattt

SEQ ID NO: 2393 - DNA, 1496 bp, Zea mays
atggaggaaaaccacactattcacccagttccgactactgtgccaaccaccagggtaaaactaacgacaaaaaccaacccaaagtcccaaacctgtgtagccttccaaccaaaccaacccacgccatcatcttccgtcaatccatccatccgcttgtccctaccacctccaccaaccaaaacccccaaccgccgaggtcaccggcgactccgtcctcgccgcgccgcgccgcgccgtgaggatgtcgttccactaccacgaccacgggctgtccatggacgccgcggcggcggcggccgccgccgccgcgtcgtcgccgaacctagcggcttctcccccggcatcggcggggagagggagaaggcggccatcgcggcgcacccgctgtacgagcgcctcctggaggcgcacgtcgcctgcctacgcgtcgccacccccgtcgaccagctcccccgcatcgacgcgcagatcgccgcgcgccccccgccgctcgccgcggccgccggggccgcggccgccggggccgcggccgcgggaggcccgtccggcggggaggagctcgacctcttcatgacgcactatgtattgctcctttgctcattcaaggaacagctgcagcagcatgtacgtgttcatgcaatggaagcagtgatgggttgctgggagcttgaacaatccttacaaagcctaacaggggcatctccgggtgaaggcactggaggaaccatgtctgacgatgaagataaccaggtggatagtgaagccaacatgttcgatggaaatgatggatcagacggtatgggctttggccccctgatactaacagagggtgaacggtccttagttgagcgtgtacggaaggagctgaagaacgagcttaagcagggttacaaggaaaagcttgtcgatatcagggaagagatcatgcgcaaacgcagggctgggaagcttcctggagataccgcatctgtactgaaagcttggtggcaagctcattccaagtggccgtacccaactgaagacgacaaggccagactggtgcaggaaacggggttgcagctaaagcaaatcaacaactggttcattaaccaacgcaagcggaactggcacagcaacccaacatcctcggctgaaaagaccaagaagaaaaggtgatgatggcccagagcaatcttggcaaaaagctagagatgtccactatactttattatggcgaagtacattctccctcacttcgtaggcaagagggaaaggtatcttgggtgacttgagtggccacctaatgcgcaagtttgacgacgtggtggggctggagttggtagtgacctcagcagtatagcattcgctaacgtgatgtgggtgaatcacgtgttgcagtagaaccggcgagcgggaggggggtaatttatgttgtattgtaattgtgttttttattaccttgtaatgatattttagggagaatcccaagattcatattcgcatgttttgtcgtccag

SEQ ID NO: 2394 - DNA, 1878 bp, Zea mays
atgggctgctcctcgtcgaagctggacgaggaggcggccgtgaagacctgccacgaccggaagagcttcgtgaggaaggcgatcgcgcagcgggacctgctggcctcctcccacgtcgcctacgtccagtcgctccgccgcgtctcgatgggcctcttctactacttcgccgaggacgagcacctccaccggctgcaggagtcctcgtgcgtgcaccgcccgggatcgcccgacaaggttctcgtcgtcgtcaactgcctgaggccggcgggtgctccggtgcatccggtggtcgagcagtgggagccgactgatgaggccattgaggctgccacgatagacggattcttcggggcggatggcccgttcctccgtcctccgtccattgatccgatgtttggcccatcggtgtcgccgcagccgcggagatgggacctcttctgggaccctttctcttcgctgaccgatcatccgagttacagcgtcgaggaggtgagagatgatcaagaagacgaacagataccagagctggaggaagagagtgacggcggcggcggcgactgtcaccgagaaggtgaaggcggagcagaggaggaggagggtgaacaggcagcagtagcagcacaggtggcggcgccgtcgagggagcaggtggggagaaaggtggaccatgtgagcaacgagctgagggtgctggcaagcgcagaaatcgagcagcatggcgcgcctggcttcaccgtgtacgtcgaccggcccccggcgagcatggcggaggccgtgagggacatccaggggcatctcatgaagatccttgacactgccaaagaggcctccgtgctgctggaggttgtcccctaccagaggagagttcaaccacctgtcccgagggacgacggcgaggagcagggcgcccccgaggtcccgccggagccgttcgagctgttccagagccacaaggagagccttgacaggctctacgagtgggaaaagaggctgtacgaggaggtcagggcaggggagcgagtccggctggcctacgagaagaagtgcgcgctgctgaggagccaggacgccagtggcgccgagccgttcgccatcgacaagacgagggccgccgtcagggacctccgcaccaagctggacatctccctcacatccgtcgacgccgtgtccaggaggatcgccgcggtgcgcgacgacgagctcctgccgcagctcctgcagctcgtgcgagggttggcgaggatgtggagagtgatcgccgacgcgcaccgggtgatgaagcgcaccgccgacgactcgatcgcgctgctcacggcctcggccgccgcggccgcagccgcccggcccgacccggtacgcgaaggaggtggtaccagggggccgccgccgcccccgggcgtggcgcgcgcggccgcggccgcgggcgcgctcggcgcggagctccgcggctggcgcgcggcgctggaggcctgggccgagtcgcagcgcgcgtacgcggccgcgctctggggctgggcgcggagctgcgtcaaggacggcgagaacatgccgcgcctgatcgtgagctgggcgcgcgcggtggaggccgtggacgtggagccggcggccagggccgtggacgcggccgctgaggcggccgccgccgtcgcgtcggccgcgaagcggcagcgcagcggcgggggcgaggagtggttcaacgaggacgaggggaagaagaaggtctgcgtggggctcgccgcggcgctgggtgccatcgctgaggccggcgccttggccgtcttcgggtacgacgagctgctgctcgagatggagatgggtgcgagggaacgagagcgcgagatctccggcagggacgacgaatgcttcaatccgtaa

SEQ ID NO: 2395 - DNA, 1925 bp, Zea mays
gggtaagtatcttaagttgtgtcttcgagtgtccagaggggtgaatgtaaaaaactcaagacatgtatcttgacgaatacacaatgtcttagctctatgtttaagacatgagactaactgattggtcactttaatttatcgaatgatttgattggtataatgaatatggtaagacacatgttttagacatatttactgtattttgttgtgttttagttgtgtcttatatttggagtactgtgcaacagtgtctaggctgtagatacgtaagtcgttgtcaaagaaaaagtattgggatgcgaaaaaacgtgagtggaaaataaagaaaaaaaggaggcccaaatataaagaagaccagccttttttttctattccaaattccgtttcccccgtctcttcttctgcacagtccacactgttcacttccggccccctcccccgcacctccctccgatcccccaaatcccgaattgaccaacccaaagccgtcgccccgcatggagtggacggccccgaagcgcgccgcctcgccgccctcgcctccgctcctctgggactggggagaaggaccacgccgggcgcccacgggctcgggcttgggctcctccggggacgcccccgcgcggcgcggcgggagggagcgggaggcgaaacgccccagggccgacgacggcgaggtgaggtgccaggtggaggggtgcgggctggacctcagcagggtcaaggagtacccccggaagccccgcgtttgcgaggcccccacccagtccccccgcgttgttgtcgccggtcaagagcggcgcttttgccagcagtgcaaccgatttcatgccctgtcagagtttgatcagaagaagaggagctgcaggaggcgtctgtctgatcacaatgcccgccgccggaagcctcagccagatgcattcgcctttgcctctgcaaggctgccttcgtcgtcgttcgatgataggaggcaaataagttttgtctggaataaagctcctgttagccatcctttcacttctccatgggacagctcatctgagctccctcatgcaaaggaaataagagaggtgtcaacgaaagttgggacaattactggacaagttcatttggataaatcttacgtgtccaatgctgttccatcacttacccatggcaaagatgagccttggccaatgaaaggtccggacatgtctatagctgcttcaaaattcgatggagcaccggatcttcagcgtgctctctctcttctgtcagttggcgcctgcggattgcccgatcctgtacaccaaacatcttgcgtcatccaattcactagtgccagcgagaacagtggcgaccttcatctatcacatggagcgaactctggtctagcgtcatgcggtgatggacagcatatagcttctcagcctcaggctcagctagttcggtttaccatggataccagcaacagtgtctatgagcccagtttcttcagtgtaaaccagataaattaagcgttgaagacacacgccacttggtcatttggataaatagccctgaagatggcctaagcatgtgcaagaagttcttcaaccaaccaccggacataaggatctatctgttaatgttatctgtgtatttattagccatacctgaattaagttgaacccaatctaggccagcttatgtgcaatatgcagttccaacctgtgattgacccattttttctgttgtttctttgcccgtgatgtgactgctctggaacttaagtgtgatactgttgtagttacactttactgccctgacaatgatgtcaaacggctggatatctttgaaactgtaattgatgaatctggacgtgtatttttgtgtgtgtgtgtgtatggtttttgcttcttcaatgcttgtccaaggaatatagatatataaaaagctgttgcatc

SEQ ID NO: 2396 - DNA, 2210 bp, Zea mays
ggtccttgcggtacggcttcggatacaagcgtgatggtgagaagcaacccggaatgctgatccaaaccgggggaccggcttctcggattcggcccattagttacgtccgttttaatctgtcgaggaggcccacaaagcccagaccaggcaggatcttcccgttcgcttccccatttcgccctccccctccattcaaatcccgctgcttccgccaccggctaccctcgcggcctcgcccgtggccacctcctttcctctttccatttccgttcctccgctcccgatccctaaaccctacctaccccaaacccgcggcggcggcggcgcgactgttgggtttccttggtcatgggctgcttcctctcctgcttccggggcggctccaacccgtcgggcgatctccgcgacccgctcgtgagggagagccgcatcggggacgcctttgtcaacgacgagaagaagcttgatgaagcgactggaaagctggatgtcgaggcggctactgaccacggagtcgacgacgagcttcggagagaggcaaattatctcaaatcatgtggcacaatatcacagaccccaccggaaattctagattcaatcccaatcaactcagaagatgctaacgagtgcggcgatacaccgaccaacgtgcagcagacgaaacatgtagtggtagttgaagagaactcatctgaactgctcaactccgatgatcacgatgtactacataagcaggacactgatgaagggaggactctcaggacgggatcagagactcaaccatccttagaagaagttaagccttcgtgccaccagaacgtggtgagagaccaaagcaccgactccagtgactcgccctatccaacccctctggtgctcaggggtgacatccagactcctggcaccgtatacgccgccgctcacaaggaggcttggaagcctgggaagcgcgcgagggcgttcatctaccctgtcctgcgccccatcgagaacaagatgcagtggatggaactgaaagccgccgagtctcctactgtgctatcacccaaccctccaaaaagaaggaacctgagcgcagcaggttccggcgacaaggctcaccagccgcctacacgttcagcgttcgccggatcttcagagcacggatccttcccaaatacttacagccgtgcagcgcaggacggagtgatgtcgcccgatgaacccaagtgccagaacggcttggaacagcaggacggacgcgaagagctatcgacgcgaagttctggacgcgggaagcgtggtgtcgcaagcctgtctcattggctgaagccatcgtcatcgtccgcggatgacggcagccccgacgacggcagcagcaattttgttggaacggaggaggagaagacacggtgtggggcgaacgtctctgatgtgcccttctttcctgcgttcgggttggactgggagggggagaccgacaagcctactcctgtgctgcccaaggcgtgggacggcaacggcatcccgaacaccacaaccaaatacaaggaggaccagaaggtaagctggcacgcgacgccgttcgaggagaggctgctgaaggttctgtctgacgagaagcctcggcatgaaaggtttgtttttttttctttctgttacgaccctgcgtgtccgtgcaggtgcagagagctgtctagggtgttcggtgttccggtttggagttctgctggttactggagcagctagatgtgttcgtacgaaatggaatcacgtaggtgtgctgatgcctgtatgtaattgtatggtggtccatcttgccaggaggatcagcgggaagcttatccacctcgacgaaaacgccgagtagaggggccttttgcgccgtcctctgcatcaagaaccgtctaaagaatggtccaggtggtggtggccgccagcccaccatatgaactccgtttttcagccgcatgtcacctgtagatagagtttctttcgctgagttatgctctgcactctgcagtgctgcgtggaatgttacaagcatatgtgatgacgtgtcaataaaaggacaaacatgccagtctcatagtctggtttcatgagaaacatgaacatcctcatatattaaaaaaaacctgtgcggtggttttcgtggcctcgtcggtctttttatgtattgagaccgttctctctgaaccgctaaacataacatcagttccttgtgtgcc

SEQ ID NO: 2397 - DNA, 793 bp, Zea mays
tcccactcccctccctcccgcatcaccagccaaacgccacctcgtgctgccccgagctcccggcctccgcagtcaggaacatccttctttctcccgagctcctactcctccacgtacgctcggagcttgccataggacgccagtcgtcagccatgaagcggctcctgaggcggctctcccgcacggtatcggtatcggtggcgggggaggacggaggcccggcggcgcggcccagcagcaaacacaagcaccggaggaggaggaaggggaagaaggcgggggcggtgccggagggccacgtgcccgtgtgcgtgggcgaggagggcggccccgcggagcgcttcgccgtgcgcgccgagctgctcggcgagccgcccttggccgcgctgctccgccgcgccgcgcaggagtacggctacgcgcaccctggcgcgctccgcatcccctgccccgtcgacgacttccgccgcctcctgctccgcctctcccacggcccctcgtcgcccgcgccggatgctatgcctagggcctaggcgcaggcgcaggcgttcctcgctcctgccctgctagccaagccagtggagtactactactagcagtagctgcttgctggcagaactagctgcagccgggtgtcctttttttttaccggcccttctagttctaggactcgtcagtgtgtgcgctagggaatctggttggagaattcggcattaaccgtccctacctccctcgatttgaggctggctgtccatggtgatttacattattgatgactattgaggcagtagtg

SEQ ID NO: 2398 - DNA, 2056 bp, Zea mays
ctgtcctgtccctgtcgcctgctcacgttccattcatcgcccggcttcagcgaagccaagtacagtgctcgatcgcacgctgtctgcctgcccccgccactggatgcgcctcgccgccggcaatggcgtccgccgtagctagcagcgtgcacgcgggacccgccgcggcaggggccttgacgttcgggtggctcggcccgcgcctgtccctgggcggccgcgacgcctccgccaccgccgcggaggcggaggaacccgccgcggcgtccaatgcggcggagccggcgatctccaaggacttcatcgacttcgagttctgcctcggcgtgtcgtccaccacgatgctgcccgcggacgagctcttcgccgacggcaagctgctgccgctccgccccccgcaggcggccgccgcccgcggggtggagaggcggcgggacaccgcgctggtcgaggaggtcccggccgcaccggagctgagccgggcggcgcgactctccgcgcccgaggcggcgctggacctggacccgtacgtgttctcgcccaaggcgcccacgtgctctagccggtggcgggagctgctgcggctcaggaaggccggccagacgccgtccgcgtccgcgtcgcccccggcatcccccgcggcgaccccttcgtcgagggcatccagctcctcggcggccaggtcgctgaagctgctcctccagcggagcggcggcggccgcgtggcggacctcgccgcggcgcctctcctgctgcgcgacagctccgactcggaggcgtcgctgtcgctcacgtcctcccgctactcgctctcgtcgtcgtcgtcgtcgtccgggcacgaccacgacgacttcccgcgccactccctcgactccgtggacccaaccccacgtccccgcatccgccttgtccgctcccacccccaggcgccgcagccgcaaccacacccgcccgtctctgcttcggcctctgctcccgctcccgctcctgcgcgcgccgcgcatagccccgctcgccgccgcccgtctccgtcgccctcgccgccgccgccgcagcagcagcagcagcaggcaagcgtgatctcggtagactccccccgcatgaacgcctcaggcaagatcgtgttccagggcctagagcgcagctccagctcccccgccggcagcgcccactcgtccatgcggtcgcggtcgcggtcccggtcccgcgtgatggaccggtcctactcggccggcgtccgcgccacgccggtcgtgctcaacgtcccggtgtgctcgcgcccggtgttcggcttcttcaaggacaagaaggaagccgcggcggccgccgcgcggtcgcggtcggcgctgggccggaggacgacgacgacgacgactgctgcggccggtggagtgggcggcagagatctcggcaatggtaaactgacatcgttcgttttggctgactaaaagagctagtaggcgacaattagctagtggttcttcggccgcgacaaggaaatagatcaaaaggagtttgaggacttgggggtagaagaggtgggtgggggcttagtttgggatctcgtccggagaagagagacgattgggtggatagtttcggtcagctgatttcgtttcgtgaggcaaatagttttgcgagcagtttgaccaaacaccccgggaccgttttgctcctgtaatgcaattatgcaaatcctgcctgccccgtggtctttttgctagtcttccccgtatgatcctttgtagtagtccactgtactaggctaccagcacatttgttgacctttttaggctctggcaggtccgcagtgaggagaaaaagaaaagaaaataagcttttgtgcatttgtttgtttgtttgtctgccagttctttgccgtaccagcacgcacatttgtgtgaactgaaaagctgggtggaaaaaaagaagagaaagggactttgtatgttttagtaaacatgaaacatcgcaattgtgtttgtcattgcctggttaatgagcgtgtaaaaccgagctgagattctcggcttgatcgaagaagaagaaaaaaaaa

SEQ ID NO: 2399 - DNA, 803 bp, Zea mays
ctagcgatatgtgtacttcatttgaggcaaaggatgatcgatctgccatgtgttaaaaaccacaaacaaattgaaaccatacaagttcctgataacctcacagctggtttcttctcggagctgagcaagctgctgccattattctggcaaactggccggtgaggagaagcacacaaaattgtaatccacacaccagtttggctatagcttcctcccttgggccggctccctgtgcaaaaagaatggaggagatgtatatatatgcatgcatatataccaaacatgaaattacatcatatcgaaacatgaacatatggaaacacacacatggtactagccatcaaaaagtggcatgaagaatgaatcgaacaaaagtgcatgcatgcatggatgcatgcttggccccttgcacgccacccacagcaggcaaccttagcatctgggttgggcgctacatgtgtggcatacagggagccaggcacgcacacaaatctgaatttgatcaaacctctttatgtacgtatttgactctctgtttatctctgtcacacaactgtatttgcaactgtgcaaggaatgaagagactggccggccaggagagcacaaacatgtgttccgttttgggcatgcagtataacgctatatgtagcgagctaggaacagaactggagcacgatgagcaacaaagacagcaagatgaacagacttgtgctagctggaggggaggaggaaggtagcagagatctagggttagggttgagagaggaggaaagaacagctagcgagaaggcgtgaaggagat

SEQ ID NO: 2400 - DNA, 614 bp, Zea mays
acccccacgcaattcccacatctcagcttcgccgccgccctcgttcgcccagcccagccgcctcctcccgtcctccgcctgtccatggaccgccgccatcgagccgtaccttactccgcgcgccagcagcagcagcggttcctccggcccggcgcgctcgcgcggctccgggactcgaggatcgtcgcccgctccgtccggtcgtcggcgtgcctcttgctcccgcggtccgcccctccgtctccgtcccccgcgcccccggtcgtcgccgcggacgagctggccgccgcaccgcgcttcctggggaccacgagcggctctggacggtacccgctccgcaggagggtcgtcgccgccaggggcgtggcgttctcgccgtcgtcgccgtagcctggcacggacggaggcgccgtagctgagaacttgtgactagatttgtgtttagttcagtattgctgtgcagatgtttttgcactttcttggtttacttaaaaaaaaagactagagatttgaggaaggaataatcactccgtttttttttgcttggttcctgattcaactgttcaatcttcacctcgctggcaagatgcgatctggaagcagttgctgacata

SEQ ID NO: 2401 - DNA, 5738 bp, Zea mays
gctgtgtcgtgtcgtgtgctgccccacttgcagttggactcgccgccgctcgcttgctgtggcctgtgtccgagccggcctaccccgcctctgaacaccgcctcgccgcccgcgtgcgcccccctccaactcctatggccgcgccctcccacctccacctccacctcccgggctgcccccaaaccctagccctgcccctgccctccccggggggtttctccgcttggcccggcctccgctcctgctcccgctcccgccagccccgcatccgcccggtcgccgcgctcggacccgccgacgccggcgacctgctcggccgcgttgaggcgttcctctacaccgttgcggacgccgccgttaacgcggagcccgtcgcggcagccgcggacaccgggaccaaggaggccgccgccggggactggctctccggcatcaccaactccatggagaccgtgctcaaggttctgaaagatggtctatcagctctccatgttccttattcatatggctttgcaatcattctcctcactgttcttgtcaaggcagctacatttcctctaacaaagaagcaggttgagtctgcacttgcaatgaggtcactgcaacctcaagtgaaggccattcaacaacgatatgctggtgatcaggttagctctgaattaccatgcacgatgtttttcctatcagtggatgctcctcaatcctcactggatagcaagtcttattagaaagtcttgtcatttgggttcagacttttactatctattgctaccttttccgtttctcatacatccttctgttagttattcacatgtacttcctttggcattttcctgcaataggatgcttgcctacccttgtgacaataccagtttggattggtctatacagagctctctcaaatgtagctaatgagggacttctgactgaaggctttttttggataccttctctggctggtcctacaacaattgctgctcgacaaaacggccaggggatatcatggctttttccttttactgatggccatccacctcttggctggtcagatactttggcatacattgtgttaccagttcttcttgtcatttcacagtacatatctactcaagtaatgcagccaccacagagcaatgatcctaaccaacaaggtgctcaggctgtaacaaagttcttaccattgctaattggttattttgctctttccgtgccttcaggactaaggctgtactggcttacaaataatatcctcagtactgcacaacaagtgtggcttcaaaagcttggaggtgcaaaaaatcctgtcaaagaatatattgacaagctttcaagagaagaaacgactactgttcagaagaatgattctactgttcagagtgaacctctctctaaacatagtaaaccccagcctagccaagagccgaaaccaagtgggccacaacgtggtgaaagatttaggaaactgaaggaggaagaatctatgagaaaagaggttatgggacaaggtaaacaatcagaacagtcaagttctgaatctagagtcacggatggaacacaaaattcggatgtgtcttctggagaccaaaaagaccaacaggggtctcatgaaaatggaccggttgtagctagtataaatggtggagtcaaccatattcgaaatgaaaagactcagaacttatcctcagaaaaggtatgcctgttgtttctgttaacatgtcttccagttccagcatgaaaacacaaaaaggatgttcttccatcgaaggactaaaagtttactagtaaattgctcgcgccgcgcgcgagtctatctatcggttttaaacggcaacatttggaaggtttgcaactatgcgaaggtcgcgagacgaggacatacacgttgccaccctctaggaccacctgtccagcgtcgtcaccatggcgcccactcgcagcttcgttgaggtacgccctctgaccgcgagacatggtctagtcgcggagacgcaacggtaattataggggattgcgccatattgcactgttggcgacgacgttcttgctcttcctttctcaccgtcgtcgtgctgctttatgtcttcccgcttccgttcgttgaccaacccatggttgcttcctgccacccaccactgctctacgtgatttttatcttcagttcatttggtgtcctctagaataatcgtgagctatcgaatcacagagcatccgctgcacgcgcgaggaggtagtaagctgcaacatctctattgaaacgtgattgtatggctcaaataaaaaagacggcatggacacaatcaaattggataacttaatgatgtgtctccttaggattgcttcaaagtttttgggggcaaatcttgctttgatcaccaaccttagatgcccatgaagtgacccacttgttcccatttcagcaagtaaaaacatcatcacatgctcaggttgtctatgcatcatggagatacaaatttcaaagttaatttattgtaaatttatcaatgaagtagcagagagcacttaaaaaggtgagggactaccaattaaaaatatgttgtcacaattatgttgaaacttacattttacacaaatttataaaagtaacaaaaaattatcttccttgttcccttcctaagaacatgtggtggcctcataatggtcctacacctatcccagcaagacctggttgttgtcgcgaataatgttgaacaccctgcccaacagccgcaacagaaaagctcaaggtcaaatttcacaaaaaaggtaacataacggtgtggtgatttggttcgtccaatgtagttatatattgaagatccacaacagaagaagtattgataaagaatattgacatatcacatattaaccaaaagtatatgaatgctcccacagaaacaggtctaggtagcatgcaagtagtaaactcgtaacaacaaaatatggttgtaatgtcacagaacattagaaccaccaaggtgtaaagctatgaggcaattgtgacatatcatatatcagccaaaaggccaccaaatagtcacatgtttactaacggccaatgcacatggatccatgtttacgtggacaaaataattggcaaaaaaatatttaagcacctgttcatagttataatctcggccagttccctcccaagggtatgttgggacacttcaaagcataatgccttcccctagttcctgtacaacttgatcatctgaaaagcagggagagccagatattgcaaaagtactcaagttgaattaaaatccacctgaaatttttgtaggatgaacaaatgtaaagccttaattcactggttgatttttaaacttgcacaatgactaaatgtaaagcctcgattcattttctgattcttaaacttgtctagtctagctcccaatgagtgtatctgttgtgcctgtttatcttcctcattctagtgaagttaagtacaccggattctgtgactgccagtgttttttctgtcttctctgcaaagttgtccattccatcagaaggtttttggatgacgacctccttaattttcttcttcttgtcggatcaaaagggggcaagtcgtaggagaagaaaaaatatagatacatgaacatgtagtggaatagaaccttaaatgtaacccacaactcgcaagctcaaccctagctggaaccgctatgaatcaaggcaagcaaccgaacaggcgaacaacactataattatcagaaacactatcagcgcaacgatggagaatacacagctcacttctgaggcctcctctcttctctccggatgctcctcatctgccatggctgacgtggtcgccttcacctccgtgaccatgtgcgctgacgccatcaacatgctccttgccacccaacagaagacgtcagttccgtcagcccgctcacgacatagggatatatggctggctaatccgcctccaatggcgagcggtcatggatgccgatagagaagaggaaaggggagggggctcacattttcggatgatgccatcgtcgtcatgctttgcctagtccgcaatgaggggcagggcggcgccgtgatccccgtcctcgccgagcgccatcaacgacagatcatcgggcgagtggtccatgctggtcgtcgggctctgtcggccccgatcctaaattcctaatcctcttacgatgcggaagaatgaagaaaaggtgaaggggactgcatcgctcgccggtcggcgcccgtcttagcggcgcaggctcgctcgctccttgtttccctgcttccctcgcccggcgcctgacgaccgcttatttttttgctgcatagaggataagttgactcatagactggattctggaattatcgagtagaagccgagtcgttcgtccaccaccaagcattcgctgccgtcagaatgcgatcgcacggcctagaaaaaagagaccgacgtggacgcagcgagcgacgagattccctccccgctctattataaggaaatctcacagcagctgttcggttgtttatgagtttcaggaagcagctgacgatcactcacctgatgtccacaaattaacggaccgagagaatggcaatgacgcggtatagagtggatgttagcgatctactgctctctgaagatcagtgagtatcgtatctgcttcatcgacgtatagctgggagatagtgaccaacagtttcacgaacagctactacaggagagttgagaatcaacacgaagaagatgcaaacaggaggcaaaattgtgcaaaccatggtctaggtctaggctcatttatttatttttgtggctgtgctttaggttatgtgaagcatatggcatatatatatatatatatatatatatatatatatatatatatatatattagtagataaatgtacacctggttttgaccgtgcaattcgatattttacctcatgtaaataaataaaatccataaacaacctgaatctgttcacagaataatcccagtggggtgcacggagatcacacagtcacagatgtaggacaccgggcatgaggtgaggacgtcgtcacctgggacatggacaggacggtggcggcgccgcctactgctgcccggcgttctaggatctgctggacatggacaggacggtggcggtgatgccatttgtcaggcataattgaattggagctaagcatctacaacgatgagtttgcatgtcccatgcaacgatgctatgcttgctcacatgaattgtacacaacaatctcaggctcaagaacatgattcatttgcatgctctcgactagcagtgtttctacccaccggctaccgccaatttcgcctacagaaacagacacgagataccgaagactgcagatcgccaaaagacgatgccaaatggcttctcgatcatttgtaaatttgcccagcttaatatacctcgtatactatatacaactcaatcctgtacaatgtttcatgaacacctagaaattcgagatcccaaacttggaaactaacaaagtgaaacgatatggttttgctacacagctgaagattgacgggataagggtagagagagacgagaactgctgcaccgctcgtcgcttgcgctgatgcaatctcttcaaggcgtttccatgtggattcttgcttcaacttaatctccttctctttcgctttctcttcctcagtatttccgcaggcactcggtaaatagtccaggatcatggctggtgaacatttagagtaaggcttcgcacagct

SEQ ID NO: 2402 - DNA, 544 bp, Zea mays
cggaacacgccacaggcttccacgcaggccgccgtcgacgctgctacgccgcgagcaggccgggctcacgggcaccgacgccgccgcacccgagcaagcaggcgcgagcacgtgggcacagccccgccgccacttcaggccgcgccgccgcaagtcgaagaaaccacaggtcgtcgttaagagccataagaatgcagaagaaagagaaggagatagtggttcggacgggcaggccgagcagggctaccaccgtcagcaggtcatgtcgccatcacatctcgcaagcgctgccaccacgccgccccgcaagcaggtgtgcgggcgcgccgcctcacagcctggcagcacgagtctcgccgccacgccacctaggcgtgcgcgcgagcgagcgcatagccgccgcttcctcaccgtgcaggcacgcgggtgcacgggacccaagctgctgccgccaccaccctggaggaaggcaggcacggccgccgccgccgccgccccctgtccctttcgcgggaataagattagaggaaagagaaagaaaagt

SEQ ID NO: 2403 - DNA, 1836 bp, Zea mays
attactcgaaaagaaaactagccgggcaagttacgcccaccaccataccgtcccacgcggcctcccaaactaaccgtatcccccggcgaccgggaactgcaaccgatggaccgcctcgtcgtcttctcccggcgccgccgccgctggatcctcctcgctgcggccggtgcggcggcggccgtcggcgcgtacaagatctaccaccaccctgccgtcgcggaacgtcgccgccgcctcgtgcgcctagccgccgccatcgcggccttcgctgatgccgccgcatcatccgccgacgccgtggccctggtgacatccgatctcgccgactttgtccattccgacgcggacgaggtcccccgcagcgtcaagcagctggccaagctcgccgcctcccctgaggtatccgccaccgtctccaccctatccgaggcagtaacctccgggatccttcgcgggtcgggatcctctagctccgggcccgcatccggcggtaccgtggccctctccgatcgtctcgtagacaggctcttctctgactcaggcgagcgcctcgcgtccgcggttgccggcagcttcgcccgccatctcgtcctcgccttttactccgctccttcaccacaaggggaggcgtcctcctccccgacgatgtgggtcaacgtggttgcgactggaaagtgccggaaggcgataagcaactgggttgaggtcttcgtggggactgctgtgagggagttcattgacaagaccatccacatcaacacctacgagcagctcttcgaagggctcaccaatccgagacatgacgctaaggtcaaggaattgcttgtttcagtgtgcaatgctgcggttgagactttggtgaagaccactcaccatgccctgtacagtactaatggcaacttgggtgcaaatggtagtgtcagtggcaatgccaatggagctggggaagggtgggtggagacggtgtcgagcacgttggcagttcctagcaacaggaagtttgtgcttgatgttacagggagggtcacatttgagacagtgcggtcatttctggagtttgttctttggaagctgcaggatggggcaaggaagggcggtggctccgtggttgacagtggcctgcgcgtcgtgaggtatatgagcgataagtcgatggttatcgccacgatctgcattacgttgtgcttgcatgtgttgaatgggactaggctcttggtaacagcttgagagtgtacttgtttggttttcctattttttgcacattgtttgtgtaaaactgtaggactcatactgaaactgtaaatccaaaaggaatggaaataatagaaataagatcaattgtgctgtacaattctgttttatgcctatatacttgaggtctgaacgactttagtgagagagttgttgatctgtagcactacctgtttgcaaccatatttgtgggattaagtagcatttacatgcctgctgtcattgaagctattttttttaccagtatagcattactaatattgtgggggtcaagttgatccactaaaatgactaaattctgtgcttttgtatctcttgtcatcaatgatgtaaatcggagcttgtccgtgtgattattgaattatgtaagaactcaactttggtttctattatttgagttatttactcactataggatggtatccaatcatcttgtcttgatcttgatttttgaaatattaacaatcctagtcataccaacttgatattcttctctgggttttctttttataagggaagcaggagtagtgcttcatcctttacttgttacttgtcttgatattgattttgcaacattcagaaatc

SEQ ID NO: 2404 - DNA, 1384 bp, Zea mays
tcaacacgttaaactcatcggttagattgggacatcaacgcggcacaacacttaccgcctataaaatgcacaaacatctccatcaatgggagcccctcatacacaacacatctagagttatcgttgccgagctctggacaagcagctccgactttgcaaaacgggccacacatgatcaaacaaaacacgatgacgcccacaaccaaacaccagcacataatgagaaagatcgcgatgcctcgtcgtgccaagcctcaacacaccccacgtgagacagctccgattcttcaccaacgagcttgaacctccatcctacccccggcaaatgctcgacccatcgaaacaatccagtccacaaagaatggggctcgttagctgtcatcgttgcttagccacaacccctgatgcagtagcttcgacttcacgttgtaaagcgccatcttcacatgtataccagacgccgataatctaaagcaaccatcgaaggtgaatacgacgccccaacaggggaagcgacgcccacgagccttgccgtcgctgaggctctcgcccaagaagcctccagcactaacgtcaggccaagagctaccatcatcgtcgtcctccataccatgtgtgtcacacagacgcctgccagagccgcacccggcaactgatggcactagcacacacggccaccgaatccagctgtcgcgcgggcaccctgccaccgccaccaccaccttgcgccatcctaggccactggtcggcgtcaccctcacaaacgtgtgacctctagcaccgccacgttgacgccagagcgtcgcgccaccaccaacgcagtccgcagcttcacacagtcgcacgccgaggccacaaatgaccaacgtcgtcggccccggcacctgccgatgccgccgccatcattcgccagcagccacaggacatgtgccccaccatctcgggcgctgtcctctgccctgagaccatcggatctggacggtagaccccaaagccggtgcctctgcagacgtagcggcctccgtcttgaccacgaccgcgagcaccacctccggtcatcgcaaaggccaccgcccgagaagggggtcaggtggagagggcggcgcggcagcggcgacgaggacgcgccccggtgatgcgccgggcgcgaccgctaggggtgcggcgagtgcagcccggtaggagagagggagaagggaaaggagtcgccggcggcggaggaggagggagggaacgggccagccggccatggtggcgacgacatcggatgaagagagaaggagagggcgacgtctagagagaggatcgagggtggcggttgaagagaggatcaatcgaacgcggctagcctcgcagctgacccatcgagacagccatggcggag

SEQ ID NO: 2405 - DNA, 945 bp, Zea mays
atgcctggaggaccgtcgaggagccagccgtggagccgcgcccgaggaggaccgccgaggccgggcggccgggcacgcgccgcgctgggatgcacgggtgctggggccagaccgcgcccgcccctgcgctggattcgaggccgaggccgcgcccttgcctggaggatcgccgaggagccagccgtggagccgcgcctgaggaggaccgccgaggccgggcggtcgggtacgcgccgcgccgggatgcacgggtgctggggccagaccgcgcccgcccctgcgccggatccgaagccgaggccgcgcccttgcttggaggaccgccgaggagccagccgtggagccgcgcccgaggaggaccgccgaggtcgggcggccgggcacgcgccgcgccgggatgcgcgggtgctggggccagaccacgcctgcccctgcgccggatccgaggccgaggccgcgcccttgcccggaggcagagcagttctctgctcgtgcccacgcggaggccgagcgggcctgcctgcgcgcgccgggtggcgaggccgaatactactcacatctgtgcacatgcagtcgctggggagcccctcccgatttggcttgcctcccccgaaattgccggcgttctcgcccttccccgtcgcgccgcgcgatgctagccgtgattcccgcgtccgcccgcccgacgtctacaaacttgttctgcagatgcccctcccgcccatcgtcatccatcccctgcctctgccgcggacgaccttccttggccgccaccagggggcttctgcacgcgagcgcgcaggggggagctatggcccatggcgttcgacttcacgccccgtgcaacccctcctcaccgtgtcggcacgctgcccgtctttgtctcatctcgttggtgctcctccctccctcggggcctgcttcctccccatggtgtggatctag

SEQ ID NO: 2406 - DNA, 3582 bp, Zea mays
gtccatctccatgctcaagatatatatacggcgctccttttgttttggagtgaccaacgatggcaactcttccgaccgagcctctcttgttcctgatgttttgctagatttaaggattcatacatatattcagaccaaggatttgaaccctatcaaacatcaaacgtgcaccctcgcactatgttctgagcccacccctgctatgcaaaatcagtcacgtgtgattttcagtttccacttgccgttaggttaatcacctgtccctgcccagagtagctgcaaaactaggcctaaattttcggttttcagtttctcactaccgttaatcacgtatccttgtcccgagcgaacatcaccaacaggcaacagctgtgtgtcaccactcacgaggggcattaccgtaaatgcaagctggatgttgaggtgtcacatcacatctactcccctcgcggcaagaaaccggccccgatatatcccacattcccccaccacccacaccgagccaccgaggcgcggcaggaaggaaagcagcgctgcggagcagagtgtgtcgcttcgctgtaaaaacaggggagagggagacgcgcccgctgccagtgcctgccgcacacgcgtttagcgtttaagttccactcctcgccgccccagatctccgccctcctcaccactgcccctcattccccggcgcccagcacccggcggccgcaaccgccgcagtccggagcaagatcggcgggtagacggacggacggacgggcgacaggcgggcgggcgcggctctgtctgtatctatctgttggtgggagaccggttgtgtcggttaggcggcggcgggtgggaaggaagaatggcggcgggcggcagatccatcgcgtgctttgccgccgtgctgctcgcggccgcgctgctcctctccgcaccgaccaccacagaggcctacgattcgctggatccaaacggcaacatcactataaaatgggatatcatgcagtggactcctgacggatatgtcgctgttgtcacaatgttcaattatcaacaatttcggcacatcggggcacctggatggcagcttgggtggacatgggcaaaaaaggaggttatatggtcaatggttggggctcagaccactgaacagggtgactgctcaaagttcaagggcaacaccccccattgctgcaagaaagatccaacaattgttgatttacttccaggcactccatacaacatgcaaattgccaattgctgcaaggcaggagttataaatacctttaaccaggacccagcaaatgctgcttcctccttccagatcagtgttggtcttgctggaactaccaataaaactgttaaggtgccgaagaatttcactcttaagactccaggccctgggtacacatgtgggcgtgctattgttggcaggccaacgaagtttttctctgcagatgggcgcagggtaacccaagctctaatgacatggaatgtgacctgcacatattcccaatttcttgctcagaagactccatcctgctgtgtatctctctcatcattttataatgacacaattgtgaactgcccgacatgctcatgtggctgccagaacccaagtgggtcaaactgtgtgaacgaggattcacctaatctacaagccgcaattgatggtcctggtaaatggactggccagcctcttgtacaatgcacttctcacatgtgcccaataagaatccactggcatgtgaagctcaactacaaggaatactggagagtgaaaatcactatcacgaacttcaacttccgcatgaattacacacagtggaacttagttgctcagcatccaaactttgataatatcactcagttgttcagcttcaactacaaaccacttactccatatgggggtggcataaatgatacggcaatgttctggggtgtaaagttctacaatgatttgctgatgcaagccggcaaacttgggaatgtgcaatcagaactgcttctccgcaaggactcacggactttcacattcgaaaagggatgggccttcccacgccgagtgtacttcaatggtgataattgtgtcatgccatctcctgaaaattatccatggctgccgaatgcaagccctctaacaaaacaagcattgacactcccactcttgatattctgggttgccttggctgttctgttggcttatgcatgatgagtgggatcaagatgtttagcaagcttcaagttgatgtcggattccatgaggtgcactgcaacgggatatttattcattcaattccatagcggcacaggagagatgaggcgaagccaagaaaaagtggatgtgtgtgtgtgtgtgtttgtaagttaaagggccaaaatgtatttcttgtctggtagtatatagcagctctacaacactttggtgaacttagttactgcaaattaggcaattacagttgcaccttttgtattttatagcaaacccagacttctattggattctatgactgcccctcttgtagtaaacgcaaggcttcactggtactcctgtttaaagattggtcaaatagaagagacgacggtgattgtctgattgagataactaagttctggtgtcttgatccatttgaccattctgctgcaaagattattgagctaaattgctaataacaagtgttaactgttgactgaaccaaaattacgtgtgcaaaagaaacaacgaaccacaataagactgtctgcagtagataagataaaggagacgcaggcactgtttacatagtagagtttaaaatattacaattatatgtctcatgttttactctgtttattatagatagtctgagtccggcagcgggtaccggaaacgtgtcgtggatgcgtattattcgcggcgtgtggccctgtggatgcatccagcaggtgaggccatggacgtgcctgctatagaaagagagtgcggtaacatccgcatcctctctcctctgtccattcacatcttccctgttttcgtcggtacagacatgctgacgcgcagtccgaatacggtagctactggatgacgggcctcctatccgcgctcgctgatgggtcccactgcagaacgaggtgttttccgcgttggggctgtctccaccaagggccctaatgccgactccagcaagaatcgctgcatggttctgaacctcagctaaaatagagtacgagcagcgcatgcaacgatacgattcttgtttcgctattatttattaagagaatatagtatgttaatatagttggtatattatagaggataaaatttagaatacgctgctggagatggtaaagatatagaagacgatttttttagagtgaactgtaaaaacaaagaattttcctttaaaagatgaaatttagagaacgttgatggagatagccgaaagcgtcatttactctaaatatagaggatcctctagactctccagcagcatttaaacggtcatctaaatttataggtcgttgctacactctctctctctctatatatatatagtttctctaaacgatcctctatttatttgaatactataaataaccgttttaccaaaactaaaa

SEQ ID NO: 2407 - DNA, 1138 bp, Zea mays
gtttcttggtacagttctatactcattgtctattattaattgctgatcaagtgctgctagatagatgtttcaggcctccaacacggtatgtctaaagacgatttctaatcagcccatgggccgtgagggaaaaaataaccctagcagcccaagaagaccaccaaagcagacggcaagtaccctgtagcacccccacccctccgcctccaaacatgttcttcttccgctacaagatagcaacacaggcgaggatcccaagacccgagccgtgtaggctgctgcagtctcttcctccccggcaagccgcggcggtcgttgccccggcccctcatataatatagtcgccgcctccttgtcaccgccgattcgattaggttgatacagggaggagtcgcgaggggacgtagatgccgacgctgacaaagctgtacagcatgaaggaggctgccctccacaacacgcccgacgactgctgggtcgtcgtcgacggcaagatttatgatgtgaccaagtatttggaggaccatcctgggggcgccgatgttctgctcgaagcaaccggtaaggatgctacagaagaatttgacgatgcagggcacagcaagagtgccaaggagctaatgcaggactacttcgttggggagttggactcggacccaactcctgagattcctgagatggaggttttcagaaaggaacaggacacgggatttgccaggaagcttatggacgacgtggtgcaatattggtcgatcccagccgctgtaattgggatatcagctgttgttgccatattgtatgcgcgaaggaagtgaaagccgatgtgcatgtgccgagcttgggcagatgaccccttttagagggatcagcccatggtgcatggatatatcatatatcatatctcctgtccagaaccaaattacattatgatgttcgattcttaaacacttaatggcaaacatttgccggattgatggcattattttgtcgacacgacaatcaattgatggatttattactcttggaaccaaccatcacgcttgctggcgtaaatatgttccatgccacctttgatgcttttgaacgccatggattggcattcaatctttaacttttatctcaactgaattcggtgtta

SEQ ID NO: 2408 - DNA, 4081 bp, Zea mays
gtccgtgtcgcgtcaatgccgttgccgttaaacgtccctgtcggctgtcgcgctgcctcgccgcagtcctccgatgtcgccgttcgcgttccgtccgggtccaggcattcatccacagctacgggacaagtcaccgtgcccgcaggccgcagccacacgtggggcgcaccaccgtccgacgtggaacctggccccacctcccccgcccgttgcctacggcccgcctacccttttaaacccccgcaccgcccgcctacgctacgccctctctcagtccactctctagtctctactctctatccccgctcttgccctccaacggtcatctcatctctcgctctcgcacgcacacaaaagagcagaaccttccaaggatcggatccaatcgattagccacctttttcccggcggcgccgcgatggtggcggagggcgcgcggcggcgggtggtggtggaggtgtgcaacgcgcggaacctgatgcccaaggacggccagggcacggcgtgcgcctacgccgtcgtggacttcgacggccagcgccggcgcaccgccacgcgaccgcgggacctcaacccgcagtggggggagcgcctcgagttcctcgtccacgacccgggcgccatggcctccgaaacgctcgagctcaacctctacaacgacaagaaggccatcaccgccgccggcagcggccgccggggcggcaccttcctcggcaaggtcaaggtggccggcgcctccttcgctaaggccggggacgagacgctcgtctattacccgctcgagaagcggagcgtcttctcgcagatcaagggggagatcgggctcaagatctggttcgtcgatgacccgccgccgccccctgcaccggctgcggcggaagagaaggaagctgcggcagcggcggcgggcgaagggaaggatgtcaaggacaaggctccagacgctgccgccgcaccggctgctgaggagaagaagccggagacggcgccctccgaggagaagaaaccagcggaggccaaagcagaggagaagaaacccgagtccgcggagaagaaggacgacaagaagaagtcgccggagaaggggaagaaagacggcgacaagcccaaggaggaaggcaaggctgagaaagacaagaaggacgcggccgcgccgccgccctctccatccaagctggcgccgccgcgctcgccgtccaagaaggacctggcgatcgccggggtggctggcgacctggagatccgcccccagagcgccgccgagaagagcatggccgcgtcgggcgccagcgcctcgtacgatctggtggatcgcgtgccttacctgttcgtccgcctcctcaaggccaagcgccacggcggtggcgacggccagccactctacgcgcagctgtccatcggcacccacgccgtgcgcacgcgcgccgccacggccgccggcgagtgggacctggtgttcgccttccacaaggacagcctcaccgacacctcgctcgaggtcaccgtcctcgaggaggccaagaagccggccaaggagggggacccggttccgccggaggccaacctgggtttcgtctccttcgacctccaggaggtcccgaagcggtcgcctccggacagcgcgctcgcgccgcagtggtataccctcgagggacacggatccgaggacggcgccgcggtctgcgacgtcatgctctccgtgtgggtcggcacgcaggtcgacgaggcgttccaggaggcgtggcagtcagactccggagggtacctggtgcacacccgctccaaggcctacctctccccaaagctctggtacctccgtctcagcgtcatccaggcgcaggacctacgcttgccgtccccgccggacgccaaggcgaagcagtgcggtcccatcttcccggagctgtacgtcaaggcgcagcttggcgcccaggtgttcaagaccggccgcgtccagctcggcagcgcggcggccgggacggccaacccaagctggaacgaggacctgctgttcgtcgccgcggagccgttcgacccgttcctgaccgttgtcgtggaagacgtgttctccgggcaggcggtgggccaatcccgcgttcccctgtccacggtgcacaggcgatccgacgaccgggtggagccaccgtcccggtggctgaacctgtgcggcggcgaggcccggccgtacgccgggcgggtgcacgtgcgcgtgtgcctggagggcgggtaccacgtgctggacgaggcggcgaacgtggccagcgacgtgcgcgcggcgtcgaagcagctgtcgaagccgccggtggggatgctggaggtgggcgtccgcggcgcggccaacctggtgccgatgaagatcgccaaggacggcgcgagcgggtcgacggacgcgtacgtggtgctcaagtacgggcccaagtgggcgcgcacgcgcaccatcctggaccagttcaaccctcggtggaacgagcagtacgcgtgggacgtgttcgacccctgcaccgtgctcaccatcgccgtcttcgacaacgtccggtacaaggccgccgcagccgacgatccggggaagctgcccagggactcccgcatcgggaagctccggatccggctgtcgacgctggacaccaaccgggtgtacgccaacaccttcgcgctgacggcggtgcacccggtgggcgtgcgcaagatgggcgagctggagctggcgatccggttcacctgcccgtcgtggctgacgctgatgcaggcgtacggcagcccgctgctgccgcggatgcactacgtgaagccgctgggcgcggcgcagcaggacgtgctgcggcacacggcgatgcgcacagtgtcggggcggctggcgcggtcggagccgccgctggggccggaggtggtgcagtacctgctggacacggacacgcagtcgtggagcatgcggcggagcaaggccaactggttccgcgtggtggggtgcctgtcccacgtggcgacggcggtgcggtgggcgcaccgggtccgcacctgggcgcacccgccgacgaccgtgctggtgcacctgctgctggtggccgtggtgctgtgcccggagatgatcctgcccaccgtgtgcctgtacctgttcctggtgctgctgtggcggtaccgcgcgcgggcgcggcagccggcgggcatggacccgcggctgtcccacgtggacagcgtgagccccgacgagctggacgaggagttcgacgggctcccatcggggcgccccgccgacgtggtccggatgcggtacgaccggctgcgcgccgtggccgcgcgcgcgcagacgctgctgggggacgtggcggcgcagggggagcgcgtggaggcgctgctgtcgtggcgggacccgcgcgcgacggcggtgttcgcggtggtgtgcctgctggcggcgctggtgctgtacgcggtgccgttcaaggtgctgctgctggggatggggttctactacctccgccaccccaggttccgcggcgacatgccctccgccggcttcaacttcttccgccgcctgccgtcgctctccgaccgggtcttctagactctctctctctctctctctctctctctctctctctctctctctcgcatgctcagatcgcggtctctgcctctgctactgatctctgatcagtctagttcgtttcttgatcgtttcatcttcacttctccgtgtaatctgcctttgtcaggttgccttgttttttttatcggttgcagtcagcagcaagcctcggttgatgaggcttgttggcaacatcaataacagcagcaataataatatctattgtattcgttcgttcatctctgtttctgggtttagtacatggatgagtttgattgtgggtgagactgggaaattgactgttgcattgcatcagtcaagaacaatgctgcattgaattccagtcaaaaataaatacataaataaataaaacagtgcaaccggttttgttacagcttgcgatttggttcagagccggaggtgcaggaatgagaatgccatcattgtttttcctctccgggttcttgttttccgttctgaagacgaagagctcagtcc

SEQ ID NO: 2409 - DNA, 1812 bp, Zea mays
tacctggttgatcctgccagtagtcatatgcttgtctcaaagattaagccatgcatgtgcaagtatgaactaattcgaactgtgaaactgcgaatggctcattaaatcagttatagtttgtttgatggtacgtgctactcggataaccgtagtaattctagagctaatacgtgcaacaaaccccgacttccgggaggggcgcatttattagataaaaggctgacgcgggctctgcccgccgatccgatgattcatgataacttgacggatcgcacggccttcgtgccggcgacgcatcattcaaatttctgccctatcaactttcgatggtaggataggggcctaccatggtggtgacgggtgacggagaattagggttcgattccggagagggagcctgagaaacggctaccacatccaaggaaggcagcaggcgcgcaaattacccaatcctgacacggggaggtagtgacaataaataacaataccgggcgcgttagtgtctggtaattggaatgagtacaatctaaatcccttaacgaggatccattggagggcaagtctggtgccagcagccgcggtaattccagctccaatagcgtatatttaagttgttgcagttaaaaagctcgtagttggaccttgggccgggccggccggtccgcctcacggcgagaaccgaccggctcgacccttctgccggcgatgcgctcctggccttaactggccgggtcgtgcctccggcgccgttactttgaagaaattagagtgctcaaagcaagccatcgctctggatacattagcatgggataacatcataggattccggtcctattgtgttggccttcgggatcggagtaatgattaatagggacagtcgggggcattcgtatttcatagtcagaggtgaaattcttggatttatgaaagacgaacaactgcgaaagcatttgccaaggatgttttcattaatcaagaacgaaagttgggggctcgaagacgatcagataccgtcctagtctcaaccataaacgatgccgaccagggatcagcgggtgttactaataggaccccgctggcaccttatgagaaatcaaagtctttgggttccggggggagtatggtcgcaaggctgaaacttaaaggaattgacggaagggcaccaccaggcgtggagcctgcggcttaatttgactcaacacggggaaacttaccaggtccagacatagcaaggattgacagactgagagctctttcttgattctatgggtggtggtgcatggccgttcttagttggtggagcgatttgtctggttaattccgttaacgaacgagacctcagcctgctaactagctatgcggagccatccctccgtagttagcttcttagagggactatggccgtttaggccacggaagtttgaggcaataacaggtctgtgatgcccttagatgttctggggccgcacgcgcgctacactgatgtatccaacgagtatatagccttggccgacaggcccgggtaatcttgggaaatttcatcgtgatggggatagatcattgcaattgttggtcttcaacgaggaatgcctagtaagcgcgagtcatcagctcgcgttgactacgtccctgccctttgtacacaccgcccgtcgctcctaccgattgaatggtccggtgaagtgttcggatcgcggcgacgggggcggttcgccgcccccgacgtcgcgagaagtccattgaaccttatcatttagaggaaggagaagtcgtaacaaggtttccgtaggtgaacctgcggaaggatcattg

SEQ ID NO: 2410 - DNA, 1705 bp, Zea mays
tacctggttgatcctgccagtagtcatatgcttgtctcaaagattaagccatgcatgtgcaagtatgaactaattcgaactgtgaaactgcgaatggctcattaaatcagttatagtttgtttgatggtacgtgctactcggataaccgtagtaattctagagctaatacgtgcaacaaaccccgacttccgggaggggcgcatttattagataaaaggctgacgcgggctctgcccgccgatccgatgattcatgataacttgacggatcgcacggccttcgtgccggcgacgcatcattcaaatttctgccctatcaactttcgatggtaggataggggcctaccatggtggtgacgggtgacggagaattagggttcgattccggagagggagcctgagaaacggctaccacatccaaggaaggcagcaggcgcgcaaattacccaatcctgacacggggaggtagtgacaataaataacaataccgggcgcgttagtgtctggtaattggaatgagtacaatctaaatcccttaacgaggatccattggagggcaaagtctggtgccagcagccgcggtaattccagctccaatagcgtatatttaagttgttgcagttaaaaagctcgtagttggaccttggggccgggccggccggtccgcctcacggcgagaaccgaccggctcgacccttctgccggcgatgcgctcctggccttaactggccgggtcgtgcctccggcgccgttactttgaagaaattagagtgctcaaagcaagccatcgctctggatacattagcatgggataacatcataggattccggtcctattgtgttggccttcgggatcggagtaatgattaatagggacagtcgggggcattcgtatttcatagtcagaggtgaaattcttggatttatgaaagacgaacaactgcgaaagcatttgccaaggatgttttcattaatcaagaatgaaagttgggggctcgaagacgatcagataccgtcctagtctcaaccataaacgatgccgaccagggatcagcgggtgttactaataggaccccgctggcaccttatgagaaatcaaagtctttgggttccggggggagtatggtcgcaaggctgaaacttaaaggaattgacggaagggcaccaccaggcgtggagcctgcggcttaatttgactcaacacggggaaacttaccaggtccagacatagcaaggattgacagactgagagctctttcttgattctatgggtggtggtgcatggccgttcttagttggtggagcgatttgtctggttaattccgttaacgaacgagacctcagcctgctaactagctatgcggagccatccctccgtagttagcttcttagagggactatggtcgttttaggccacggaagtttgaggcaataacaggtctgtgattgccctttaatgttctggggcccgcacgcgcgctacactgattgtatcccaacgagtatatagccttgggccgacagggcccggggtatcttggggaaatttcatcgtgatggggaatagatcattggcaattggttggtccttcaacaaggaaatgcctaataagcgcgagttatcagctcgcgttgacttacgtccctggcccttttgtacaccaccgccccgtctgcttcctaccgattgaatggtccggggaag

SEQ ID NO: 2411 - DNA, 537 bp, Zea mays
atggcgcatgacgagaccggctacagcaagaacgagtcgtacctcgatggcgatgatggagaatacggggagcacgtcggagctcggccaaacatggacagtaccaccgcgtcgaggaagcgagcttcgacgccgtcgccttcggccgagacgaagaacgcttcacgtacgccgagctccggcaaggctggacccaagttgcggcggagtgtgccgcgcgcggacgatatggcgagagactgccgccggtcttcgtcgctgccgaagtcaaagcagcacgcaacagccatggtcggacggagacaacaccttgggcgcggtggcttccaacatggcccaacgggatccattttccgaccattggtgacaacggaaacggccacccttccctccaccgagtacggagtcgtatacggactctgttggaaacacctccgcgctctgcctacgcaaacgcagagggcgctccctaggatatggatacggagggcgccgttgctggagttggtctcaccgggtgaagcaacagtcatatag

SEQ ID NO: 2412 - DNA, 3926 bp, Zea mays
acctcatacgggttaaaatgactgctcaaatcaaacacccctaaatttctaatagcgccaccggacgtcggcccactccgtctatggcgcgaagcgccgccgcccggctactcgctttctcccctctcctcggctccagccactgccacttgtgccttagccaccctcccctcctccgtctccttcctacctgccgttctaagaccacctcccgcaagccgcctcgctcacagcatcgtagaaaggtggcgcctgcaaccgccggcagcggtcgcccagggccgccgccaggggcgcccccctgtcttttccaggaaatctccgaactcgtcgcctcagtgaccaatggcgaagcgttacgaccccgaaggaatggcagtgcgccttctgatgacgtcggagctgctgctatggggtgcaccgaaggtgcacgaggtattgcttcagggagagcggcgatggcttctacctccagtgctggcagcatagcggaccgggtcgttcttggtgaccgtgcagatgatgggagacgtcaatcttgtggcactatcgcaaatactgcagcattctgccgggaggctggagacactggcatgacagtagattctgatgttgataatatcagcgcaatggtgcacaggattacaggaatcctccggtctgaggcacctgggccaccagtggagcagaaacttgagagcctgggtgctaattacactccaaaccttgttaacatggtgctgaagaggtgcttcaaggtcaggcaactgggattctggttcttccactgggcaaagcgactcccggatttccaccacacgacggagacatacaacacgatgctgtacattgtgggcgaagcgaggagctttggtatcatggaggagctcgtgggtgcgatggatagggagatgtgctccaaggacatcaagacatggacgattttattatccagttatggtaagacgagacagattggcaagatgctgtcaacctttgaggcgatgaggaaatcggaatccatctggatagacagtaaagtctataggacagttcttcacgctttgtgcaatgctgataagcctgagcttgcccttgagttctacaaggatatgcccagcaacatggaggtcaggactgatattcttcgactactaatgcgttgtcttgcaacatcagataatactatcgaaggtgtctatcttatcagagatgatatgattgagggcatgaaacatccagaggagtactgctacaccgaggctcttcaaagcttttgcatagcaggaaagtttggtgaggcatggaaagtctttcagaagatgaagaacaaattgttggctaactcatctgcacttgagaatctcctgagagggctctgcagagcagggagaatggatgaagctttgcaggtcacggaatacatgaagaggacatcaggtctaaacagtacaatgttttcgttcctcatcaatggctaccttaggaaaggggagcatatcaatgcacttgacttgctacgggagatgagagaatatggatgtgtcccactggcgtcatcttatacccaggtcatgcaacacctatttgcaaccgatcagtgtgaagaagcgtgcggactgtttgaagagatgctaaaaaaccgcgttgaaccagatattgttacgttcacagcactgattggcgggtatgttcgcagcggacatatatccaaagcatgggatgtcttcaggaatatcaataagaatgttcagaaacccacattgaaagcatatacagtcttcatgcgagagctgtgcaaggtgtccaggccccttgaggccgtagtacttttgaaggaaatgctggaatacgatttcaggccttctgagagaacattctgctggttaatttctgctttacgtgacaaatcctatttggaagaggcaagtaatgttgagagaatgcgagcatcttttaatttgcgaaaccctagagatggtttgcaattcgaacagttagatggcattggcaatattgataagtttcgaaaaatgcgcaagtctaatcctcaagaaaaagaactggcattggagttcaccagctccccgtcagatcaaaatggtaagacctccagtttcacactttctgatgacacacatcagaaagaacaagagcaggactacagtgatggagatgtcgaagaaatatgtcagattctgtcttcttctgatgattggggctcaacgcaacaggcactggagacgagatcagtccattttagtcctagtcttgttgatgccattttgaaacgttgcaaaaggaatagttgtgctgctttgcaatttttctcttgggtttgtagacgtccttactacatgcctagtacgaaaacatacaatactgctatgaaacttgcgggttctgcaaaagattttaagcacatgtggtatctgtacagagaaatgttaaggaccggatgctccccaactgtggatacatggaatgtcatggtctgtcagtatggcaatgctggtctgtctgaaaaggccttgaatacattctgggacatgaagaagtgtgggtttctgcctgataaaactacttacaatcacctgataatgtacctcacacacattaaagggcggaaaatagatgtggcagtcacaatcttccaagaaatgtgtcatgcaggacatatacctgataagaggattcttttcatgtatcttttggctctatgcgagtgtaggaaaatagaagatgcaacaagctcagtagtatccttatgtgaactaggattttctgtgcaggctgtctactccatattccttagatcattgtgcagggctgatagaatggaggaagctctccatttgtttgattgtattgagaaacatggttgctccagggaccagtacatgtacgggagtctcatccatgttttgctaaggagggacaaatttgaagaggctgttgccaagcttatggaaatgaagaatgaagggatacttcaaagcgcacatatctatacctcctttattgtttattactttcagaagagagatgttgtcaaggcattggatgtgctcagggagatgaaagagaatggatgtgagcctacagttgtcacgttctctgctttgatccgtggctacatggccatggatatggtttcagaggcctgggatgttttccaacaaatgaagctgaaaggacctgcaccagactttgaaacctactccatgttcatgtcatgcctatgcaaagcaggtagatcagaggatgggttgcatcttatccacgatatgtcagattgtggtttcattcccagcacagtaaactttatgactgttgtccatggtctaaatgtggagggcaaacatgagcttgctgagtctgttctactgtcaaaatggcacttgcggaagcaaagaaccatctcatattagtttttgcttctctcacgctctcaaaagatttcttggtgtttacatcttggaacgcaaggaacaagcatatggtaggggcatgaagtaaaatgaatcatggacacttttgctcccccccccccctccatttgtcaatggtggatggagaagggtacagtaaaaaatcgttgtgaggactgactcaatgtggcatgtcttactgcttagtcagtgacagacgaatcccagtgactttactcaggacaaaggtatcacgagttgctctgagcccaatcaagggaccaaaacgccagaagcaacacacccagtattctgctgttttttgtcgatattatctaggtgcatgaacaaaaaaaaatgcttgtttgaaaatatcaaactttaggtgcttttagtgattacagaccacagaaatgaatgtcccgtgtgccaactgaaattttactataattttgcaaaaaaaaaaatctgattagatccaattgattctcttct

SEQ ID NO: 2413 - DNA, 2780 bp, Zea mays
aggaaggacaggtatgaactttactctgaatcaatacaatctgtccctgtttcctctcctgttctcgtctcctacctctgctccttctctactatctcctcattccattagcagtagctaacaattggtatcagagctccaccgatcctcggatcctcgttccatggcgtcttcttcatccatcggcatcaacttcatccaggtgctggaacatcagacgcgcgccctcttctcggagttggacaagcgtcttcaggctcgcgacgacaaatgggagttccgtgttgccgtcctggagtcccgcgcggcggattcggagcgccaactcgacaacgtctcctccgacctgcgaaccgacgtcgcggcccagatctcagtggtggaggcgctcgagtccattgtcgttgattcgacacagcacatggattcggtttcgtccagcattcgtgcagatccggaggtgcgccaagcggcggtggacgcgaccgcggaggatcggcgccaccacttcgaagccgccaccagctcacacatcacggaactcgaatcgaccacccaagtgttcgagctctggcatccccgcatcgactccgcgatcaaccatctccacccctccatggtcaaggttcgagcagcgatcgacaccagggacctacagtggtcgcctgatgcgcacggcggcggctctggcggccttctcggagagccgggtggtgaaccaactgaaatcagcggcgctgctcatgccggtggcctacctcgcccacatcaacacccccatcggcatcctgctatccaaagcgttcgtcggcgaggtgctcttggacttcctcgggatggccgagatcgacccgctagcaccactggtgacgaacctgatcagggcattctgccgctgcccgagcatgagctgctacgacctcgccggctccatcaccggcaagaactactgcctcaacagctccgtcgtcgacttcttcctcaagtacgagcccgagccgacctccacggtccactttgctcaaaccgtgcgcgacgtgctactggagcgcaacattgccagctacggccagggcgagccgccggtgtaccggatatctggcatcccaccgagctcagcttccccttcctggcgtcctatctcctgcagttggtgatccgtgaggaggagggtgaggttcccagcaccttgcccacccagtgtttgatgaattggttcagctgcagctgtgcctcagtgttgtatgacgtcaccaaactcattaagcccctaccaactctggcgatgggtgtttcaagcatacctccaccagctccattgggtattcagctagtgctcgatgctatgcctcgtgggccactacttggagatgtgcatgacaaagggccttggccaccacctattcagttcgggatgcatgccactcaacgcaggccaattccctggccatccttctctggtattataattcggaggcacttgttgcaatcactgcccttggtgccccactgctcagtaaacatgagaaagagcatgtttacccattgccaactcagtgtgatacattggaagcattgctttgagtttttagacaatgcactgtcggtagattgcttccagtcgggtgcgcctaaatgggatcaatcatctgacacccacaaggtatcttcagctgaagataaattggttgcgctgtgccgatttcgtcgagctcgaggtctctgggaaaaatgtgatgagaaatggagtcacgcctacaaatgcattgttgatgctcatcttcatgcattggaagaagtttgggagctcttggtgcctgatccaactaaaaccgaaggacagagtccagaagattcatctacagagcagctgtttatgttagtatctctggctgcttggggaggtacaaatgtttctcagactttgaaatttcaaggccaacttcagaatcattcagttctgatattgattgatagtggtagtccatataccttcttgcatgagaagttccgtgcatggttccagcatgtggatctggtggttgctccattgcaggttcgcgtggctaatggagaattgttacattgccaacacaagatactgcagataccgtggcaaattcagactttcaatcacatacaggacacgatgatcccttcaaatttggactgttttgggtggtgcacatcggatgcattttacaaagctgctgaaccatgtgggattgaggaggaccttcaacgtcggcgtgaaggtggtgtgccaccaaggtttctgattatagatgatggttggcaagagatagttgactattatccagagacgttgcatcagatgtttgttgcgaatgcaggttccagtttcaagctaccagggaattctgtgaaagactttcttgactctaaaactgcttgaagatacatgttttgggaacaaagtttcagaacaagcttcttgaagtaatcgatgcaagatcctgcatgtgtttagattctgcgtcgacttgagggcaagtcgaattttaaggaggagggaatgttacaccgccattgtcagatactccatagaaggaagtccgtcctgagtgggtactaactgcagccttgttgttgcggtcctatctaggagtaagtctctagcgtgtgaggctgtgtccctcggtcaccggttggtgagccatgttcctaagtagtcgtatatatgttgttggcttgggcagtaggaaggacaggtatgaactttactctgaatcaatacaatctgtccctgtttcctctcc

SEQ ID NO: 2414 - DNA, 1773 bp, Zea mays
ccggttgccgtggttgtaatcgtacgtgtaaagcgtacgcctacgtatttttactgcgatcaagggcgagccggctggacgccaacttgtttcgtatccctcggtcgtcgccaatatatatagccgccctcctcccggccgatcccttcgtcctcaatctcaatcccacaccaccaccaccacctcctccggtccccaacccctgtcgcaccgcagccgccggccatggcctgcctcaccgacctcgtcaacctcaacctctcggacaacaccgagaagatcatcgcggaatacatatggatcggtggatctggcatggatctcaggagcaaagcaaggaccctctccggcccggtgaccgatcccagcaagctgcccaagtggaactacgacggctccagcacgggccaggcccccggcgaggacagcgaggtcatcctgtacccgcaggccatcttcaaggacccattcaggaggggcaacaacatccttgtgatgtgcgattgctacaccccagccggcgagccaatccccaccaacaagaggtacaacgccgccaagatcttcagcagccctgaggtcgccgccgaggagccgtggtatggtattgagcaggagtacaccctcctccagaaggacaccaactggccccttgggtggcccatcggtggcttccccggccctcagggtccttactactgtggaatcggcgccgaaaagtcgttcggccgcgacatcgtggacgcccactacaaggcctgcttgtatgcgggcatcaacatcagtggcatcaacggggaggtgatgccagggcagtgggagttccaagtcgggccttccgtgggtatttcttcaggcgaccaggtctgggtcgctcgctacattcttgagaggatcacggagatcgccggtgtggtggtgacgttcgacccgaagccgatcccgggcgactggaacggcgccggcgcgcacaccaactacagcacggagtcgatgaggaaggagggcgggtacgaggtgatcaaggcggccatcgagaagctgaagctgcggcacagggagcacatcgcggcctacggcgagggcaacgagcgccggctcaccggcaggcacgagaccgccgacatcaacacgttcagctggggcgtggccaaccgcggcgcgtcggtgcgcgtgggccgggagacggagcagaacggcaagggctacttcgaggaccgccgcccggcgtccaacatggacccctacgtggtcacctccatgatcgccgagaccaccatcatctggaagccctgagcgccgcggccgttgcgttgcagggtccccgaagcgattgcaaagccattgttccttccgttccgtttgcttattattgttattatctagctagatcatctgggggtcaggtcgtcgtggtgtgccaaaacagaacacagaaagaggaagaagaaaaaaaaaacaagacgtgtggcgtttatgttatatcatccaataatggccgtaccacacttgtggtacctttcagtacgtatgcttgcattgtatgaggggtcgctttcctacgccctaccatgtctgtggctttccttgcttggtgatgcgatatggagggaatcgttcgtcagtgccagtgggcggcagcattattgtcatcgtcgcccgattggatgaataaactattattagcctgttttaggtcagaagatctgtcgtctttccccccgggaaaaatcacggtcgacgaacctatcactcttgatcggttgaggtgtc

SEQ ID NO: 2415 - DNA, 3386 bp, Zea mays
ccgcgaccccaggtcagtcgggactacccgctgagtttaagcatataaataagcggaggagaagaaacttacgaggattcccctagtaacggcgagcgaaccgggagcagcccagcttgagaatcgggcggcctcgccgccccggattgtagtctgagaggcgtcctcagcgacggccgggcccaagtgctctggaaagggacgcctgggagggtgagagccccgtccggcccggaccctgtcgcaccacgaggcgccgtcaacgagtcgggttgtttgggaatgcagcccaaatcgggcggtaaactccgtccaaggctaaatacaggcgagagaccgatagcgaacaagtaccgcgagggaaagatgaaaaggactttgaaaagagagtcaaagagtgcttgaaattgccgggagggaagcggatgggggctggcgacgcgcaccggccgtatgcggaacggctcctgctggtccgccgatcggctcggggcgtggaccgttgtcgcccgcgccggcggccaaagcccgggggccctaggcgcccccggcagccgtcgtcggcgcggacggtatccgcgcgcctctggcgcgcccctcggggcgctgcgctgcaacggcctgcgagctccccatccgacccgtcttgaaacacggaccaaggagtctgacatgcgtgcgagtcgacgggttcagaaacctgagatgcgcaaggaagctgacgagcgggaggccctcacgggccgcaccgctggccgaccctgatcttctgtgaagggttcgagttggagcacgcctgtcgggacccgaaagatggtgaactatgcctgagcggggcgaagccagaggaaactctggtggaggctcgaagcgatactgacgtgcaaatcgttcgtctgacttgggtataggggcgaaagactaatcgaaccatctagtagctggttccctccgaagtttccctcaggatagctggagcccacacgagttctatcgggtaaagccaatgattagaggcatcgggggcgcaacgccctcgacctattctcaaactttaaataggtaggacggcgcggctgcttcggtgagccgtgccacggaatcgggagctccaagtgggccatttttggtaagcagaactggcgatgcgggatgaaccggaagccgggttacggtgccaaactgcgcgctaacctagaacccacaaagggtgttggtcgattaagacagcaggacggtggtcatggaagtcgaaatccgctaaggagtgtgtaacaactcacctgccgaatcaactagccccgaaaatggatggcgctgaagcgcgcgacccacacccggccatctgggcgagcgacatgccccgatgagtaggagggcgcggcggccgccgcaaaacccggggcgcgagcccgggcggagcggccgtcggtgcagatcttggtggtagtagcaaatattcaaatgagaactttgaaggccgaagaggagaaaggttccatgtgaacggcacttgcacatgggtaagccgatcctaagggacgggggaaacccggcagatagcgcgatcacgcgcgtcacccgaaagggaatcgggttaagatttcccgagccgggacgtggcggcagacggcgacgttaggaagtccggagacgccggcgggggcctcgggaagagttatcttttctgcttaacggcccgccaaccctggaatcggttcagccggaggtagggtccagcggccggaagagcaccgcacatcgcgcggtgtccggtgcgcccccggcggcccttgaaaatccggaggaccgaattccgtccacgcccggtcgtactcataaccgcatcaggtctccaaggtgaacagcctctggccaatggaacaatgtaggcaagggaagtcggcaaaacggatccgtaacttcgggaaaaggattggctctgagggttgggctcgggggtcccggccccgaacccgtcggctgctggcggaatgctcgagctgctcgcgcggcgagagcgggccgccgcgtgccggccgggggacggaccgggaacggccccctcgggggccttccccgggcgtcgaacaaccgactcagaactggtacggacaaggggaatccgactgtttaattaaaacaaagcattgcgacggtcctcgaggatgctgacgcaatgtgatttctgcccagtgctctgaatgtcaaagtgaagaaattcaaccaagcgcgggtaaacggcgggagtaactatgactctcttaaggtagccaaatgcctcgtcatctaattagtgacgcgcatgaatggattaacgagattcccactgtccctgtctactatccagcgaaaccacagccaagggaacgggcttggcggaatcagcggggaaagaagaccctgttgagcttgactctagtccgactttgtgaaatgacttgagaggtgtaggataagtgggagcctccgggcgcaagtgaaataccactacttttaacgttattttacttattccgtgggtcggaagcggggcaccgcccctccttttggctccaaggcccggcctcgccgggccgatccgggcggaagacattgtcaggtggggagtttggctggggcggcacatctgttaaaagataacgcaggtgtcctaagatgagctcaacgagaacagaaatctcgtgtggaacaaaagggtaaaagctcgtttgattctgatttccagtacgaatacgaaccgtgaaagcgtggcctatcgatcctttagaccttcggagtttgaagctagaggtgtcagaaaagttaccacagggataactggcttgtggcagccaagcgttcatagcgacgttgctttttgatccttcgatgtcggctcttcctatcattgtgaagcagaattcaccaagtgttggattgttcacccaccaatagggaacgtgagctgggtttagaccgtcgtgagacaggttagttttaccctactgatgaccgcgccgcgatagtaattcaacctagtacgagaggaaccgttgattcacacaattggtcatcgcgcttggttgaaaagccagtggcgcgaagctaccgtgtgccggattatgactgaacgcctctaagtcagaatccaagctagcaaccggcgcctctgctcgccgcccgccccgacccacgttagggcgttcgcgccccaagggcccgtgccattggctcagcccgcccggccgacgcgccgcggcgggccgcctcgaagctcccttcccaacgggcggcgtgctgaatcctttgcagacgacttaaaatgcgacggggcattgtaagtggcagagtggcccttgctgccacgatccactgagatccagccccgcgtcgcacggattcgt

SEQ ID NO: 2416 - DNA, 1811 bp, Zea mays
tacctggttgatcctgccagtagtcatatgcttgtctcaaagattaagccatgcatgtgcaagtatgaactaattcgaactgtgaaactgcgaatggctcattaaatcagttatagtttgtttgatggtacgtgctactcggataaccgtagtaattctagagctaatacgtgcaacaaaccccgacttccgggaggggcgcatttattagataaaaggctgacgcgggctctgcccgccgatccgatgattcatgataacttgacggatcgcacggccttcgtgccggcgacgcatcattcaaatttctgccctatcaactttcgatggtaggataggggcctaccatggtggtgacgggtgacggagaattagggttcgattccggagagggagcctgagaaacggctaccacatccaaggaaggcagcaggcgcgcaaattacccaatcctgacacggggaggtagtgacaataaataacaataccgggcgcgttagtgtctggtaattggaatgagtacaatctaaatcccttaacgaggatccattggagggcaagtctggtgccagcagccgcggtaattccagctccaatagcgtatatttaagttgttgcagttaaaaagctcgtagttggaccttgggccgggccggccggtccgcctcacggcgagaaccgaccggcttgacccttctgccggcgatgcgctcctggccttaactggccgggtcgtgcctccggcgccgttactttgaagaaattagagtgctcaaagcaagccatcgctctggatacattagcatgggataacatcataggattccggtcctattgtgttggccttcgggatcggagtaatgattaatagggacagtcgggggcattcgtatttcatagtcagaggtgaaattcttggatttatgaaagacgaacaactgcgaaagcatttgccaaggatgttttcattaatcaagaacgaaagttgggggctcgaagacgatcagataccgtcctagtctcaaccataaacgatgccgaccagggatcagcgggtgttactaataggaccccgctggcaccttatgagaaatcaaagtctttgggttccggggggagtatggtcgcaaggctgaaacttaaaggaattgacggaagggcaccaccaggcgtggagcctgcggcttaatttgactcaacacggggaaacttaccaggtccagacatagcaaggattgacagactgagagctctttcttgattctatgggtggtggtgcatggccgttcttagttggtggagcgatttgtctggttaattccgttaacgaacgagacctcagcctgctaactagctatgcggagccatccctccgtagttagcttcttagagggactatggccgtttaggccacggaagtttgaggcaataacaggtctgtgatgcccttagatgttctgggccacacgcgcgctacactgatgtatccaacgagtatatagccttggccaacaggcccgggtaatcttgggaaatttcatcgtgatggggatagatcattgcaattgttggtcttcaacgaggaatgcctagtaagcgtgagtcatcagctcgcgttgactacgtccctgccctttgtacacaccgcccgtcgctcctaccgattgaatggtccagtgaagtgttcggatcgcggcgacgggggcggttcgccgcccccgacgtcgcgagaagtccattgaaccttatcatttagaggaaggagaagtcgtaacaaggtttccgtaggtgaacctgcggaaggatcattg

SEQ ID NO: 2417 - DNA, 531 bp, Zea mays
atggcaacaacaccgagaagtataccacccgccggggctgaagctgaaggcggaagggtctacgctggccgcccaatttgcgactgcgacgcccacggcccgcgggctattctgggacagcgaggccccgacgcaacaggccggcggcagcagcagcacaggaacagcaaaggaagccagaagcggaacgaggcgagcgcccggtggctgcaggccgcatgtggccgtgtggtggtgcggtgtgcggccaatcggtcccgtgctgcccctgcctctgctctctccgtcgcgcacgatctccgtgacctggtgcgcgtgcggtgccgttggcgcctgccttccctgcctagcaacagcttgcggctccgcgaaggcaaccgggggccacacgcagatgctgccgccgcgcggggagagccacaccacacgcacgcacgggcacggttggcttggctcggatcggatttcggatggcggcgggactggaccggaccggaccggacggccgttggggatggaggagtgatctga

SEQ ID NO: 2418 - DNA, 827 bp, Zea mays
ttcaccatggagtgcacctcaagccgccgccgccgtagccggctctcgcgctgcctcctcctggtgtgcgcagtggcatccctgctgtgccactcccccggcccggcggcggcggcggccgcgccccgccggctgctgcagacgtgcccggggcaggacttcgacgtgccccacgcgcacctgcgcgcgcgggacaacgtgaagccgctcaagtacacggaggagctctccgcgcgggccgcgcagtgggcgcagcagtacaggagcgactgcgaggccgccgcgcccgcgccgggaatcaacgtgttcctcggcgccgcgggcgccacctggctgcccagcgacgccgtcgccgcgtgggccgaggaggagcagcactacgactacggctccaactcctgctccaccggcaaggcgtgcggccgctacacgcagatggtgtggcggggcagcaaggagttcggctgcgccgtcgtcgactgcgactccgggaagacgctcatggcgtgcctctacgagccgcagggcaacgtcgcgggacagaggcccttctgatgatcgccgcctaccatgcaaaccatcagtagtagcgcgtgtccatggcggcagtataccaccggccgttcctagctaatcttggtgttttcttcgccttggtcttgcatttcttttctcatactacgttcctacagtagctcattggttgttgggaggtcgtcagttactagatatacatgcatgatatacatactgtatgtctgtatgccatgagagcgacgagcatataggtttgtcctcgtttgttttgttcatggcaccaccttatc

SEQ ID NO: 2419 - DNA, 3968 bp, Zea mays
atcacatcacagtgcgctcccctcccaaacggccggctgccgaggcgatccagcatgcagcagcaggctgaaacaatgggctactgctcctcctacacgtcgtcctctcgccccgtcgtcccctcctcctccctccgacgcctcggcctcgttctggcggccgcgctgctggtctggtgccagcgggtggccacggcgcagcagccggtgccggtgccggtgcgcgtgggcgtcatcctcaacctgacgccgtcgtcgccggtcgggcagcggcggaagctcggcattgagatggcggtggaggactactacgccgcgcgccccggatcccggaccagggtcgcgctgcgcttccgggactccgccggggacgtcgtcgccgccacttccgccgcggtggacctgatcaagaacgagcaggtgcaggccatcatcggcccgcagacgtcggcggaggccgacttcgtggcctacctctgcaaccgcacccgcgtgcccatgctctcctcctccgccacctccccggcgctctccccggcgcagacgcccttcttcgtgcgcaccgcgcccaacgactcgttccaggccgcgcccgtcgccgccgccctcgccacgttcggctggcgcgcggcggtcgtcgtctacgaggactcgccctacgggtccggcatccttccggcgctcgccggcgcgctgcagggcgtcggcgtcaggatcatggaccgcgccgccgtgccgggcgacggccgcatcgacgctctgctctaccgcttcaaggcgatgcccacgcgcgtgttcgtcgtgcacatgaacgcccgcctcgccgcgcgcttcttccgccgggcgaggcttgccgggatgatgacggaggactacgcgtgggtcgccaccgacggcgtaggcggcgtcgtggacgcgctcagccctgacgacatcagcgccatggaaggggtcctcagcctccgcccgttcgtgcagatgacggaccgagtcggcaacttctccgcgcggttcagggagaggctccggcgggagtacccgagcgccgacgtctactacccgcatgacccgactgtggtcatgctctggacatacgacacggcgtgggcgatcgcggcggcggccgaggctgccggtgtctccagcccggcgttccagacacggcagcagagcacggcggccacggacctggaccggctaggcgtgtcggcaaccggagcgacgctcctcaaggcggtgcgcgagaccaccttccgcggcctcgccggtaacttcacccttctcgacgggcagctgcagccgccggcgtacgagttcgtcaacgtcgtcgggaaaagctcgagagcggtgggcttctggacgccggatgatgggatcacgcagactctgggggcggacggcgccaaggggatgaggaggacaatcttttggccaggtgattccacgtccgccccgagaggctgggtcgtgtcgccgaacggacataagcttcgcgtcgccgtgccggtgaagaatgggttcaaggagttcgtcgacgtcggcggtgagtcggcgacagcagagcatccaaacatcacaggctactgcatcgaggtgttcgacgcggtcatgagcaagatgccgtacccagtgagctacgagtacgagccgttccccgacagctccgagtcctacgaaaacatcgtgtcgctggttccagagcagagcgcggacatcgtcgtcggcgacgtgacaatcacggcgagcaggatgagcaaggtggacttcagcatgccgttcacggactcggggtggtcgatggtggtggcggtgcgcacggagacgagcacgagcatgtggatcttcctgcggccgctgaccaccagcctgtggctcgccagcttcgccttcttctgcttcaccggcttcgtggtgtgggcgatcgagcaccggatcaaccccgagttccgaggcacgcggtggcagcagttcggcctcatcttctacttcgccttctccaccctcgtcttctcgcacaaggagaagctggagagcaacctgtcgaggttcgtggtgatcatctgggtgttcgtcgtcctgatcctgacgtcgagttacacagcgagcctgacgtcgatgctgacggtccagaagctccagccggcggcgaccgacgtgacagagctccagcggaccggggcctacatcgggtaccaggagggctccttcatcaagcaacgactccagaaacaaggcttcgacgagaccaagatgaggagctacagcacggcggaggagtacgccgacgcgctgtccagcggccgagtcgccgccgtgttcgacgaaatcccgtacctgaagctcttcctgtcgcagtactgcgatggctacaccatgtacggcccggtctacaaggccgacggcttcgggttcgtcttcccgacgggcagcccgctgacgcccgacgtgtcgcgggcggtcctgacgctagcggaaggggaggagatggcgcagatcgagaagaagtggttcggcgagccgggagcgtgtccgagacagagcggcggcggcgccgccgccgcgctcggcgcctccaacctcagcttccggagcttcggcgggctgttcctcatcaccggcgtcgtgtccagcctcatgcttctcgtctacctcgccaccttcatctaccgcgagcgcggcgaggtccggccggagccggaggagggagggttggggagctcatcggtgcgccggctgctcgcgtggatgcgacacttcgaccagagggatctcaagtgccccacgttcaagacggggaacgacgactgcgtcagggaagggaaccataggagatgggtggagtccgtcaggaatggccgtggcgggaacgggtcggtgcaggcggcgatcgaggagggagccatagccgttggcatgaccccgctcaggttcagcacctctactgcgtcggagacgatcaacgctgattcgtcgccggcgtcggagcttggcacctcgttcgggcaggggatactggaggcgccacactctgtatcggtggagatgccaggatcaacggcctcataaattactaccacactagtacttcctagtttctacgtacaagttggtagagggaaattgctccctggcattcctaatagaaaactctgacaagtcaaatcagttaatgctttcataaaaaaaaagttaacaagaacaaaaaaaaaatgctacagggctgtgcaaacggcagactgtcacattttacagttttacaccaggttattcttttgcaatgacacaacgttacaatacaaacaaatcaatcatgtttccttcaaaaagaacttaggatacaacaacgcacatattatggtacgaatacaacaatgcatggtgccacatcacgctccggccatggcttcgaccatagcacgacaaaaggccaacgaacatgcatgccatcctcgctgcagtccgtccgacccagttctaaggatctagtgcccgctgctcctgaactgtacacgatcctaacgatctatgaatgcaaccctggtacaatctgcgagtgagcggccgccggaggtgatatcaggagatgatatgccaacaaggacatggtgcctaaaggaacactggacttcagaatttttacctggttgacggagtaaaaatctcattactccccgtttatcatgagagaatgatacggaactttgtttatttccacgatggttgagtgctcctgtagcagcggttgtttccacggctctccgtccatctgaacatatgctcggttccactcgccacccctcatttcgaacttgatagccgcagcctggtagcaagaaacgtccgcaggaaaagacctgagttaattaggaacaatccaggacattgactcaactgctcaataacatcgactaaagtactaaactaagccccaacaaattctaaaaccttaatagaccaaacaatgttgt

SEQ ID NO: 2420 - DNA, 603 bp, Zea mays
gaacaaggcaataatcaatgtatgtttcgaactatgcataaaaacatacataataatatcgtattgtctagatggagtttgctatcctcatcaaaattcttgtagttccaagaataggacaacgaagagcatttgtgttaaaaaaaaacgatgtcaggtaccggatcatggtacgacggtgtggccaggatgctgctgtcccgctgtcccatccctacacgaaaattcgtgcctggcggggtccctcgccgacgaggcccggaggccgtcacaggcaccgccagttcccaccacggatagcaggtggccgtggccgtaggcgacttgcgagagagcgccttcgcggtcgctgcaggatgcgttcttgccgtgcggagggacacgacgcaacagcgtcacgcccgtgctacggcaaatcatcagcgacgggctcatatccgagtgcgccgccacagaccgccgcatcgccgccgcgcggaacgccacacgcacccggaaggatagcgccaggcgaagcctagccagagacagcgttggggagaaccgctcggtggagaaccaaagtgctgataacgtgttatagtatactcagtggtaacgaga

SEQ ID NO: 2421 - DNA, 1011 bp, Zea mays
gagaaaccttacccgtcctgtccaccactctcatagcaaagaccaagaccatatccttccacttgctatggcggcggcggcggcgacggcgaccacgacctctccggcgagggcttcgtggcggcctacggttcccgcgacctcggcatcggcagcaggagtctgcttccgtgttggagcgaagcgcttcagtccagggctccgaacggcaagcacctgtcggcaccgacaccgaggcagaacaaggctcacaacagctcacgtcaagagcggggaagccgaggggcgtccaagcacggaggagagcgcaactggcatcggcggcccggacgaggactccttgcggcgcgagctcgaaaccgcgatcgaggaggaggactacgcgcgcgccgcggcgctccgggacgagctgcgcgtgctccaggaggactgccgggccgcggtgctggcggcgaacgcgcggttctacgccgcgttcaaggacggcgacctggcggcgatgcgccgggcctgggccaggggcgaccacgtctacgtggtgcacccgtcggcggggaggatctccgggtacgagatggtgatgcagagctgggagatggtgtgcgacgccggctacgagttcccgctgcaggtggacctgcaggacgtggaggtgcgcgtgcggggcggcgtcggctacgtcacctgcctggagatggtcaggaccaaggggagcagcagctggggcaagcagctggccaccaatgtgttcgaggaggtggacggcgagtggctcatgtgcgtccaccatgcctcgcacttcgatgagtgaaatcgctttgcaattcgatcgatcgatgagcggaaataattttggtcggccgtcagtacagaaacatatggattcagatttcggaaatgtgatctctctctctctcacacacacacacacacagttgcattgcactctttcgttcttcgcgggagaaaagacagccacgcggcaacacacgttaagacaccgaatgctcg

SEQ ID NO: 2422 - DNA, 1725 bp, Zea mays
atggaggaggaggagggcttcctccacgtgctgcgagcgctgcgggacgccgcgcggagggtggaggccggggaaacacgcgggccggcgctgcaggcgcttctcgcgctcgaggctggcgccgacgacctcctcgccggcgaccccgacctcaccgccctacgccggctcctgtgccgcctcagagccctctcgtgctccctcgacctgtgcgcctccggctccctgcgcgcgcggtgcggcgcgcggagggcggtcgcgcgcgtggccggcgccgtcgccggcgagatccaggcgtgggtcgaccgcgaggccatcgcgcggctcgtggccgcgctgagcagccacggcctcggcggggcgcgcgcgctcctcgcggagctcgaggcacggctgctgtccgcgggcgggcggttcgacccgcggctgcagcgcgcgctgcttcgccacggcgtgttacaggcgctggaggctcggctcggggaccccgccgtgggcgacggctgcgcggccgcggtgctggcgctggtgcgcttcaacaaggacgtgttcgtggggcccgtcctgatgggccccgccgtcggcgcgctggtggcgtccgcgtccgggtccccggcgccgctgcgcgcgctcaacggccttgtggacgccatccggagcccgctggtggacgagctccacgcgcgcggggagctcccgcggctcgtcgcgctgctgtgcgcgcccgacccgcgcgcccacggccccgcgctcggcttcgctctccgcgtcggctactacggccgcaaggaggtggtggacgcgctcctcgccgagggcctcgtgaagcgcctcctctgcctgcagcgctccgacctcggcggctcgctcgcggacacggacgagggcgaggacgaggagggctgcccaaaggcgaagcccgaggacgccaaaaccggtggctttctcctcgtgccctgccttcctctggtgtatctgtgggggcgtcgccagggcgacagcgccgcggacgcggacgcggacacggaagagcggccgttcgtgagcgctgtggcgcggttcgcggtgcaggtggaggtgggcgtcgggttgagcccgcgggagaagcgtgaggcgaagctggagatcctgcggcgggtgcgggaggcggccgtgtcgccggcggaggaggccaccgtgctcgccgaggtgctctggggcgccacgccgtagccgctggcttgagtgcttcaacgatgaccgctgacccgcgggcccacgtgccgcgtacgctagctgtttgctgcagactcgtggttggtgtgcgtactactcgtttttttccttttgtttgtagcatatataagtagttttttcttcttgtttgtgcatatggttttttttttcttatttagtttaatgtttctgtggatattgttagatacagatcttccgttgcagttaggacttgtggtaggagagtcgactccaatccgtgtacgtacgtacgtatgtatacggatggatgatgtacaagagaatcaagatgtaacaagcctgtgaaaaatagtggtaggaaatggttgatgatgcaatgactgactctacacccccttctctccttactttcagaaattcagatacaagcagtaaatggtggtgcaaactgcaaagtacttaaccgacaacaaaaggacaattctattcctgtacaactaataactaacaaagtttgatgtctcgtcg

SEQ ID NO: 2423 - DNA, 118 bp, Zea mays
ctttccacagctttcttgaacttcttcttcttcttctctcttggaacggcagctttcttcgaatctgtctctctctctctcatctccgaagacgaaggtcaagaaagctgtgggaaga

SEQ ID NO: 2424 - DNA, 115 bp, Zea mays
tttcccacagctttattgaactgccctcttgcttgcttggatcaattgaaactcgatcaggtccacagcacagcctgctgcatgcatgatgcagttcaagaaagctgtggaagat

SEQ ID NO: 2425 - DNA, 3092 bp, Zea mays
cgcgaccccaggtcagtcgggactaccgctgagtttagcatattaaataagcggaggaggaagaaacctacgaggattcccctagtaacgcgagcgaaaccgggagcagcccagctgagaatcgggcggctcgcgccccgaattgttagtcttgagaagcgtcttcagcgacggaccgggcccaagatctctagaaagggacgcctgggagggttgggaaccccgtccggcccggaaccctgtcgcacacgaggcgccgtcaacgagtcgggttgtttgggaatgcagccaaatcgggcggtaaactccgtccaaggctaaatacaggcgagagaccgatagcgaacaagtaccgcgagggaaagatgaaaaggactttgaaaagagagtcaaaagagtgcttgaaattacccgggaggaaagcggatgggggctggcgacgcgcacccggccgtatgcggaacggctcctgctggtcccgccgatcggctcgggggcgtggaccgttgtcgcccgcgccggcggccaaagcccgggggccctaggcgcccccggcagccgtcgtcggcgcggacggtatccgcgcgcctctggcgcgcccctcggggcgctgcgccgcaacggcctgcgagctccccatccgacccgtcttgaaacacggaccaaggagtctgacatgcgtgcgagtcgacgggttcagaaacctgagatgcgcaaggaagctgacgagcgggaggccctcacgggccgcaccgctggccgaccctgatcttctgtgaagggttcgagttggagcacgcctgtcgggacccgaaagatggtgaactatgcctgagcggggcgaagccagaggaaactctggtggaggctcgaagcgatactgacgtgcaaatcgttcgtctgacttgggtataggggcgaaagactaatcgaaccatctagtagctggttccctccgaagtttccctcaggatagctggagcccacacgagttctatcgggtaaagccaatgattagaggcatcgggggcgcaacgccctcgacctattctcaaactttaaataggtaggacggcgcggctgcttcggtgagccgtgccacggaatcgggagctccaagtgggccatttttggtaagcagaactggcgatgcgggatgaaccggaagccgggttacggtgccaaactgcgcgctaacctagaacccacaaagggtgttggtcgattaagacagcaggacggtggtcatggaagtcgaaatccgctaaggagtgtgtaacaactcacctgccgaatcaactagccccgaaaatggatggcgctgaagcgcgcgacccacacccggccatctgggcgagcgacatgccccgatgagtaggagggcgcggcggccgccgcaaaacccggggcgcgagcccgggcggagcggccgtcggtgcagatcttggtggtagtagcaaatattcaaatgagaactttgaaggccgaagaggagaaaggttccatgtgaacggcacttgcacatgggtaagccgatcctaagggacgggggaaaccccggcagatagcgcgatcacgcgcgtcacccgaaagggaatcgggttaagatttcccgagccgggacgtggcggcagacggcgacgttaggaagtccggagacgccggcgggggcctcgggaagagttatcttttctgcttaacggcccgccaaccctggaatcggttcagccggaggtagggtccagcggccggaagagcaccgcacatcgcgcggtgtccggtgcgcccccggcggcccttgaaaatccggaggaccgaattccgtccacgcccggtcgtactcataaccgcatcaggtctccaaggtgaacagcctctggccaatggaacaatgtaggcaagggaagtcggcaaaacggatccgtaacttcgggaaaaggattggctctgagggttgggctcgggggtcccggccccgaacccgtcggctgctggcggaatgctcgagctgctcgcgcggcgagagcgggccgccgcgtgccggccgggggacggaccgggaacggccccctcgggggccttccccgggcgtcgaacaaccgactcagaactggtacggacaaggggaatccgactgtttaattaaaacaaagcattgcgacggtcctcgaggatgctgacgcaatgtgatttctgcccagtgctctgaatgtcaaagtgaagaaattcaaccaagcgcgggtaaacggcgggagtaactatgactctcttaaggtagccaaatgcctcgtcatctaattagtgacgcgcatgaatggattaacgagattcccactgtccctgtctactatccagcgaaaccacagccaagggaacgggcttggcggaatcagcggggaaagaagaccctgttgagcttgactctagtccgactttgtgaaatgacttgagaggtgtaggataagtgggagcctccgggcgcaagtgaaataccactacttttaacgttattttacttattccgtgggtcggaagcggggcaccgcccctccttttggctccaaggcccggcctcgccgggccgatccgggcggaagacattgtcaggtggggagtttggctggggcggcacatctgttaaaagataacgcaggtgtcctaagatgagctcaacgagaacagaaatctcgtgtggaacaaaagggtaaaagctcgtttgattctgatttccagtacgaatacgaaccgtgaaagcgtggcctatcgatcctttagaccttcggagtttgaagctagaggtgtcagaaaagttaccacagggataactggcttgtggcagccaagcgttcatagcgacgttgctttttgatccttcgatgtcggctcttcctatcattgtgaagcagaattcaccaagtgttggattgttcacccaccaatagggaacgtgagctgggtttagaccgtcgtgagacaggttagttttaccctactgatgaccgcgccgcgatagtacttcaacctagtacgagaggaaccgttgattcacacaattggtcatcgcgcttggtgaaaagccagtggcgcgaagc

SEQ ID NO: 2426 - DNA, 1170 bp, Zea mays
atggttttggagactgcagggggtcacggccgcaaccccaatggcatcctcggccttctatgccgggaacactttcctggacttgtcgagtacgccggagtgacgagcccagcatacaccttcgaccactacgccgtcgcccccgatgcagtagatcgggacggcagacaattcaacaacaaggcggagcgggtgaagcaagagctgtgggatttcttcaggtgcgatgctggatacgaggccagggcggatgtggtgtctacgacgtgctgtaagaagctcgtcgtggacatgcactacgaggcgcgcatccaggccatcgtcacttaccacggctccgtccttggggagaaggtgaacaagaaggacgcccgaaccatgtcattgactgcggaccagtacttgcagtgctgggagaagatggtgcagaggtggtgctcggctgagtgggacgaggcgcacaacgctagccgggaacggcgtttgctgatgcaaggtccctcccaccatcaaggcagccgcagcctgggcaaatacgcggaagcatggtcggcggcacatggtggcgcgccttgctccacgttctcggcatatgccatggcccacaaggggaaggcgacgtccgacgtcacctacaacccggatgacaggcccgaggcgtacaccaaccccgccatccacagccgactcagtgagtacaccgccatggccaaggaggtccatgggccagattacgatccgaggaccgaggacatcgacggagatgtcctcatgagggtcggaggaggcaagaggcatgggcggtactggattgccgacggggcaatcgactcgtcctccactcccactctctctcaggtgcgagcaaggagcacgagcgcgagcccagccatacgacctcggcaggacacctcacaacatcgtatccagcaactccagactcagctagatgatgagaggaggcaacgtgaggagctggagaagaggatggcggagatgttcgcgtacatgcagagccttggcgccgcacagggtcatgctccaccacctccgttgttccctgcagctgaccctacagagttcactactcctggtcaatcggcggcgtcgaacaaccctcatgcttcgtccagcccttcgccgaaccagtccagatgcccacctcgttga

SEQ ID NO: 2427 - DNA, 2298 bp, Zea mays
aattctcacgcccatcacaagtgaaggaaggctactggtgctggtgccggcactggcagccggtgcctaaccatatctacctcatataactttccactggccgtagtcggcttcttctctgaactgaagcaggggggagacaagcgccatggctgaggatgccagaggagagaagaaggatgcctacgcggcggcgccggcgtccaagttgccggcgaagcaacggggagggttcaggagcatgcccttcatcctagcgaatgacttctgcgaccggcttgcttcggtggggttcacgacgaacctgatctcgtacctcaccctgcagctgcacctgccgctcgtggaggcctccaacatcatcaccaactacaatggcactgctaacctcactccgctcatcggcggtctcatcgccgactcctttgccggccgcttctggaccatcacattcggctccatcatctaccagctcggcatggtctgccttaccctctccgccgcgctcccctcgctgcacccgccatcctgcgccaagcacgctgcagactgccagcgcgcgtcctcctaccagatttccgtgctgtacctgtctctgctctgcacgtcgatcggcaccgggggcacgcgcccctgcaccatggcgtttggcgccgaccagcttgagctgaacgcgcacaggcaccggggcgccaagcccaagtggagtttctttaacctctacttcttcgccgtcgagctcgcgaagctcgcggccgtcaccgccgtggtgtacatccaggacaacgtcgggtggagttggggaataggcgtgcctaccgtcgccatggtcgccgcggtgatcgccttcgtgtccgggtactcgctctacatcaggatgccacccgggggcagccccctggtccggttggcgcaggtcgctaccgcagcatacaagaagcggaaagccgtcgtgccggacccgagcctcctgtacgaggacaaggagctcgacgctggcatctccaccaccggacgccttcttcacaccgaccagctaaagtgcttagacaaggcggctattgtgacggacggcgacgtgctgccgtcgggtcagccgaagctatggcggctgtcgacggtgcaccgcatcgaggagctcaagtcgatcatacgtatgctgccgatctgtgctgccggcatcatcctggtgacatcggcgtcgcacaatcacagcttcgccatccagcaggctcgtaccatggaccgtgacatcacgccacacttcaagatcccgccggcctccatgctcatcttcaccaacttcggtatgctgctgaccctggccttctacgatcgcgtgctcgtccgcgtgctgcgccgcttcactggccgcccgaacggcatcactcacctccagcgcacgggcgtgggactgacgatcgccatgctgtccaacgtggtggccgcggtcgtcgagcggagacgcaagtccgttgccgctgcgagtgggctgctcgacgctcccaaggccaccctgccgatgagcgtcttctggctggtgccgcagtacgccatccatggcatcgccaacgccttcatggacgtcggccgcatggagttcctgtacgaccaggcacccgagagcatgcggagctcagcgacggcgctctactggctgaccttctcgatcgggagctacctcggcacgctgctggtgaccatcgtgcacgacaagacgaagcgaaccgggcaatggctcccggacaaccttaaccgagggaagctagacaactactactggctagtcgtggctctggaggtggtcaacctcgtctacttcttcatctgcgttaagtactacacctttaagccattggagatggtgagcggtgaggaggttgagctctaccaccatggcaatggcaccgacgacgccaagaagcaaggtgtggaagcttagagtgagcaaatccggatcccaacaagaaggcttgggtccggatgaaataattgtacttcgacatctctttaaaaaatagcacctatcttaaagcagttctgaattagttaaccattttgttaattattttcatctgaataccttctggactctgaacaatcaggagcggacttgctccagtccagcacaaggcaaagcgaacacagagctctcatagctccggttctagtaagaatcactccggtaaagtcgagcagtaaaaatctaaactgctacatggtcggattggagtgaatctagtgattctagtctatgttttgtactataaagtaagagaaaaaaaaatgtttcccacc

SEQ ID NO: 2428 - DNA, 1257 bp, Zea mays
aaaaacccatcaggtttcgggtttcgggtacccattgccatctctaaacctcacccctccctagtatgcgaccctgtttcctgtctcctaccctcttgcggtcttgccagcgccccttcctcccttcgtctccgccgccgcggactcctcgccggaaccctaaatggaccccggcgccggtgcacactactccgcccgtaccgcggaggaagtcttccgcgatttccgcggccgccgcgcgggcatgatcaaggccctcaccaacgatgtggagaagttctaccagctgtgcgaccccgaaaaggaaaacttgtgcctttatggctaccccaacgaaacatgggaagtaactttgccagcagaggaagttcctccagagatccctgaaccagctttgggtataaactttgctagggatggcatgaacgagaaggattggttggcgttagttgctgtccacagcgatgcctggttactagctgttgcattctactttgcagcccggtttgggtttgacaaagaggccaggcggcgactcttcaacatgataaataacttgcccacaatatttgaagtagcgactggggttgccaagaaacaaaacaaggagaaggaacccaataataccagcaaaagcaacaaaccaagttcgaaaatgacaacaagacccgagtctcatttgaaggcgacaaaagtggcgccccctaaggatgaagatgatgagagcggtgaagagtatgaagaagaggaagagcgtgataacaccttatgtggatcctgtggaacaaatgacggcaaggacgaattctggatctgttgtgatagttgcgagcggtggtaccatgggaagtgtgtcaagatcacgcctgcacgagctgagcacatcaagcactacaaatgcccagattgcagcaacaagagggcaagagcctagcaccaagccctgctgtgactctggagtgaagtaagcgccaaatcattgatgtctgcagatatatgcctagctgtctagcttgtagacttgctttccatttggaatgaacgctgttgattcactcggttgccctcagcagctcatgttgctcaggcttaattgtgtttaatgttttactagcgaaacaaaatgtgccagtgtgttgcatcggagcgtatattttattatccggtaatcgtacccatagcaaacttgtctatacgttgcaacaggacgtattattgtgcggttatttaaggctagccatttttgtttgactaaaa

SEQ ID NO: 2429 - DNA, 1122 bp, Zea mays
agtccgattggatcggcccggccgccgtccccgtccgtccgtccggtgtgtcaaccgtacaccacctctcgcctcctgtcaattcccttcccggtcccccaccggagccagccagaggaccctaccgcggggcgaggtcgttggattattaatcctccctcgctgggtcgtcttctccgatcgtcgtcgtccacacacgagtcacgcatgcccggccggccctacctctacctggccttcttgttggctccaatcggcctctccgagctagcaaggtccctgctgcctcactgttgccacgcgtgtacgcgtatttctgcccagtggcagcgccagtacactacctcgatcgctctacaccgtgcatatacatgcatacgcgcgccaggtacggtggactggtggtggcctttttttattattattttaactaaaatagcctccgtgcttatataacaggcggcagccggcaggaggccggagtgagtggctggaaggagagagcgcttgagtgcggtgcatatgctcaggctagctcagcgcgcaccgtctccggcatgcatgcatatgggctgggcggcatggcagctcgatcgatgtgtgctgaggatggcgaggtgcgcgcggtggagaagcagggcacgtgcattctttccgtcgccggccggcttggcagcggccggcggcccggctctcgcagtcacgcgtacgtcgcctgagcggcgcgcgcgagagagagagacacggcaggtcgtcgccggcgcggctaactggtgcaggtgcagcagctagcttctgaaacccagccagccagccagccggccggccggccgatcgatgcgtgcatgtgcccttcttctccatcgggcacgcctcgcctgcgctgcgcacccccttctgtgagtgcatgcaagtaagcaaaaagactgtctgtactttaattttcacctcgagcagggtgcagcctctgcaagtctgcatgcatggaccgccgcccccaggttcttggaagcggcggccggctgcaaagtaaagcatgcatgcgcatgtgagtctaatgttttgcttccctcatcgttggatctcttttgctaatataatcattagtaccaatttcgatga

SEQ ID NO: 2430 - DNA, 2838 bp, Zea mays
cgcgccgccttcatccctccccacccttgcccccaaatccaaatccgcccgcctgccgcagctcccattctcgcgccccgccttcttcctccagcagccccgctcgttcttccggcctcgcgttccgtctccgaagccgcaggcagccatggaaatcaacgaggaggcaatggcggcgcataagcgcgccttcctcgacttcctcgaccaagacgtcgggaagggggtttacatgcaggccgtccgcgacatggtccagaacaagcgccaccgcctcatcatcggcatggacgacctccgcaatcacaatctcgatctcgcccgcagggtgatccggacccccggggagtatatgcagccggcgtcggacgcggtgtcggaggtggcgaggaacctggatcccaaatttttgaaggaaggggagcgcgtgatggtgggcttctcgggtccgttcgggttccacagggtcacgcccagggatctcatgtcctccttcatcggcaccatggtctgcgttgagggcatcgtcaccaaatgctcgttggttaggccaaaagttgttaagagtgtccacttctgccctgtgactggggactttctctcgcgtgaatacagggacatcacatcttttgtaggcttgcctactggctcggtttatccaacaagggatgacaatggtaacttgttggttaccgagtatggaatgtgtgaatacaaggatcaccagacattgtccatgcaagaagtgcctgaaaattctgcacctggacagctcccaagaactgtcgatgttattgtagaagatgatcttgtagattgttgcaaacctggtgaccgtgtctcaattgtcggtgtgtacaaggctctaccagggaaaagcaagggaagtgttagtggtgtcttcagaactgtccttatcgcaaataatgtgtcgcttcttaacaaagaggcaaatgcacctgtctacactcgggaagatctgaagcggatgaaagaaatatcaaggagaaatgacacctttgacttactgggaaattctcttgctccatccatatatggtcatctatggataaagaaggcagtagtactgttgatgctaggtggtgtcgagaagaatctaaaaaatggaactcacttgagaggagatataaacatgatgatggtgggagatccttcagttgccaagtcccagctcctaagagctgtcatgaacattgcccctttggctatctcaacaactggcaggggttcatctggtgttggtttgactgctgctgtgacttctgatcaagagactggggagcgaaggcttgaagctggtgccatggttcttgctgatcgtggtgttgtctgcattgatgagtttgataaaatgaatgatcaagatcgagttgctattcatgaagttatggaacagcaaactgtaaccattgcaaaggcaggaatacatgcctcactaaatgcaagatgtagtgtaattgctgcagcaaatccaatatatggaacttatgatcgttcattgacaccaacaaagaatatcgggcttccggattcactgctttcccgttttgatttactttttattgttcttgatcaaatggaccctgagattgaccggcaaatctcagaacatgttgcccgaatgcatagatattgcactgacgatggaggagcaaggtctcttgataaagagggatatgctgaagaagatgatggtgatgctaatgcagccatttttgtcaagtatgatagaatgctccatggtcaggatagaagaagaggaaagaaatccaagcaggacaggctaactgtcaaatttctgaagaaatatattcattatgcgaagaaccttattcaaccaaggctcactgatgaggcatctgatcatattgcaacctcatatgctgagctcagggatggtagtgcaaatgcaaagtccggtggaggtacacttccaattacagcaaggacactggaaaccataattcgtctatcgacagctcatgccaagatgaaactgaggcatgaggttctgaaatccgatgttgaggctgcattgcaagttctaaattttgcaatataccacaaggaattgactgagatggaagagagagaacagagagaaatggagatgaaacagcaagctgatcatgatgcaggtgcaaccggtggcactgtggatgggcatggaagctctggcaatgatccaatggatgtggatgtaggatcaaatgatcagaatgtttccgcagagagaattgaagcatttgaagcacttctgggtcagcatgtgttggcaaaccatatagatcaaatgtcaattgatgatatcgagcagatggttaatagggagtcaactgcaccttacaccagaagccaagtagagtttattttggagaggatgcaagatgcaaacagggtaatgatacgagatggtgttgttcgaatcatataactaccagtctaccaggacgtttacctgtggatcccatggtcatgctgtgtcatggtgcctgtctgtctgtctgtaaccaacttatatgtcgaagtatttgtttcttagtgtttgtccacaaaggattgaggcaatcattgccccccttggtacttttagttcatgtgatgtattgcttacttacctgacctagtgatatctagtactcagtcacgtctggttgtgttcgagttaatttgcaaatgcagttgcattctgacgagtaaaattcacacgtgctgagttgctgacggcgtaggctttctaggtaccgatgccagatgagatttgttctgattctctgttgggttggcaacgtgatacttaattgtattgtaaaatct

SEQ ID NO: 2431 - DNA, 621 bp, Zea mays
atggattctaagttcgataaatactgggagaagggcaagtataatatggcacttgtcatagccactatacttgacccgtcaaagaagatggattttttggactttttttatgagaagacgtgtcaacagtttatcgacatccagataaacatgtccttggccaaacaatggttcactaaattttttggtgaatatgcaaaaattgttcaaaaagatactacagtctcacctattgttgctacaaatactagtactttgggctcaccgattcttggaaaaagaaggttggataaagaattttctcagtggtcccaaacaagaggaagacgtcttgcaaagtctgagcttgacgcatacttagaagaagaatttgtgagaacagatgaaagatttgaaattctaagttggtggaggacaaatgcaaacaaatacccagtgctttcagctatggcgcgtgatttattagcaatacctttgagcactgttccttcggagtctgcttttagcgccggtggtcgcattcttgctgataatcgaagctcaatgacaccagaaacacttgaatgccttgtatgctgcaaggattggttgtatgagtacccaaatattcaaggtacttga

SEQ ID NO: 2432 - DNA, 1879 bp, Zea mays
atttcctttcatccatctccgtatggaccgtatccctgtctctctctcttctccccctcccccccaatctccgaggcgagctcgagctcccaaaccctaggcctcactggggagtcacctccgccactccagcgatgtctctcgccgcagcggcttgacggtgcctgcccccaaatctacctctccgttagagagcgcggcgtggttgctgcgtgaggcgcaccggggtctgcaaatggagccgaggcgcatatcggcgagcccgcgcccatgcagcgggcggcgggtagtggccaggaagaggccgaggcaggaggcggtggtgagcagtgtgcggaagctgcagcgccgggagatcagctcccgccgcgaccgcaccttcaccatgagcgccgcgcaggagcgcttccgcaacatacagctgcaggaagagtttgacactcatgatccaaaggagaacgcttcactactcccttacttgaggaaaaggtcaaaaatcattgagatagttgcagcgcgtgatatagtctttgctttatcacagtcaggagtatgtgctgcttttagtagagagacaaatcggagaatatgctttctgaatggaagtccagatgaagttatccgcagtttattttacaacaagaataatgattcactcattactgtatcagtatatggttctgaaaacttcagtgctctgcgatgcagaacaactcgaatagagtacgttcggcgaggacaaccggatgctggtttccctctttttgagtccgagtccttgaaatggcctggatttgtagagtttgacgatgtcaatggaagggttttgacttactctgctcaagacagcacttacaaggtgtttgatttgaaaaactacacattactgtatttggtgtctgataagaatgttcaagaaataaagatcagccctgggataatgctattgatttatgcaagaacaagcagctcggttcctctgaagattctttccattgatgatggtacagtcttgaagtccttcagccacctcctccatcgtaacaagaaggtagattttattgagcagttcaatgaaaagcttctggtcaagcaggaaggagagaacctccaaattcttgatgtaaggaacttccaattgacagaagtgagcagaactgagtttatgactccatccgcctttatttttctacatgagctgcaactgttcttgacattccggaatcgagcagtatcagtttggaactttcgaggtgaactggtcacgtcatttgaagatcacctgttgtggcaccccgactgcaacacaaacaacatatacatcacaagcgatcaagatcttattatctcgtactgcaaggctgactcaactgattcaacttcagaagaaaatgctggctctataaacataagcagcatactgtccgggaaatgcctggcaaaaataaacactggaaactccaatgcttgcaaggaaagaaagaaggcgtggaagttccggaacacagtctcggaggcccttgaggacatcacggctctgtactacgacgaggatcgcgacgagatctacactggcaaccggcacggccttgtccatgtgtggtcgagctgaaagctgaaactgcggggcggctttcaaccgtagcacggtgatctggtcttcacctgtgcgcgtattaacagctactagtgcctcacgtggcacgggggtggggggcacgaaagagggaccccccaagccactcaagtgacagttcttatttatctcagcatgccaagagcactgtccatcattctgaaatcagaggccccccagatctgttgtaacggacgtaccttgcaagtaatgaaatccattcgttgatctgaaatgctctcg

SEQ ID NO: 2433 - DNA, 1202 bp, Zea mays
cgtccttcgaatcaccgtccgattatgggtcagcttcagcggagggcatgggggccccggtaacattggcttcttcgtagacgtctccaatggcagtctggcagaggccacagtgccacacgccacgtcgtccgcgtcctagccactcacgaacgcgggccgagtcaccgcccgcccacctcctatccacttccccatctgccagccgtccgagtccgaccacctctcgtatcgattctccaagcgccgcgccgcgccgggcgaagaagctcgtctcgtctccatggcggccgcagcggtggccatctccacctccgtgtgcacgtcctcaaggcgtagcacgggctgtccgaacgtgaggccccaggcccgtccgctcctaggcatgccgtcgctgcgccggaggctgcagacggccttggccgcgacgggcaagacgccgggcgaggcggaggagcaggtccccgcgtgggccaagcccggcgcggacgagccgccaccctgggagcgcgagggcggggccgcgcgtggacaggaggcccggcaggtccccttctacgcgtacctgctcgcgtctacgatcaccgccatcgccgcgatcggctccatcttcgagtacaccaaccagcggccggtgttcgggatcgtcggccccgacagcgccctgtacgcgccgctcctgggcttcttcgtcttcaccggtatcccgacctccgcgtttctgtggttcaaggccgtgcagacggcgaacagagaggccgaggagcaagaccgcagagacggattcctgtgagaggctgtgggtgactccggcgcactcgccggtgccgtcgccgtgcagaagaacgcgcaccgcaccaccgtggtgttcgcagcgacgggtgacgggtcatgtactcaagttatgtatgtcagtgtactgtattctagaattggagagagcagatggatttgcggcacaaatcagagaaaatatcataatcatcattcgtatgagtggaaaatatttgtatttatttggttgaaaatggtatagcgtttttttgcacttgaatagttagatagattgcttattgcttctagcatatttttggcactcgtgcgtattgctctttattttaactagaataggaagtgctctctcaggcgttctaccattcatgtaatataaatgaacacgacatgaccataggtaatattgc

SEQ ID NO: 2434 - DNA, 1654 bp, Zea mays
taaaaacagtattttacaagagaccgtgaatacaaacgtgatagcctcatgctcgcagctcgacaaacgacagcggcctagccccgcctccccgttatccgacctatccccagcgtcgttgggtcatctccggcagctcccccgctaacacctccatggcgtcgaagcaggcggcggctggcgaagcccttgcggcccaaatcaacggcatgtcccgccctgagatgtacgacatgatgtccaagatgaagaccatgatcgaccacgaccaggagacggtgcgccgcatgctcgtcgacaacccggacgtcacccgtgcgctctttcgggcacaagtggtccttggaatggtgaaaacacccaaaactacacaagctttggacatggtccaacccacagcagtgccaacagcaccttcctcagtcaaaactactgcaccagatcatgtcagcttgcccccgcccccattacctgctaaccagcagagtgttgctcaactttctgccccgttttcatctggcttgtctaatgtgggatcgaccatggaccctcctactatttcagcaaatccaccacaatcagcacaagcaaaaggataccttatccatcagatgccttcatcagctcctcagccatctcaacatccaaatatggccctacctcatgctcctccacagtattccaatgttccatcacatatacctatagttcatagtcagccacagcaacctttgcaaagtcctgcaatatataatcaacagttgcaaccacctttgccccaattgtcaaggccgccttttcctcatcagatgcattcacaagtaccaaattcatttgggttgactcatgcaaatgctccgcagcacatgttacaacaaccaatgtttcatccggttgcgaatcctcaaactaatttcctccctggccaaccaccattgcctagccagccaccaccacagcagctgtaccaggctagttcacactacaatacacaaaatacgactccaatgcaagttgataggggcgctccctgggggcgggcccctgatgctcccactcctggctctcatttccctggacaattacccgggttgcccggacaaatgacccaaggaattggtggtatccaggcaggccaagcaccactgacacctgagatggaaaagatgctagtccaacaagtcctgggcatgtccgctgagcagattaacatgttgcctccagaacaacggcaacaggttcttcaactacgagacatgctacggcaatgatagatcgtcagttgactgggtggagaagtttcagttcactgcagcagggatcccgagtgtgggtgcctgttcgttttagccttttgtatcacctgattgacatcccgactagtctgcagcctaccttggatatgcgattgtagaatggtagtcgttgtcgtcatttatagaaatgcttgggcaatatgttttccgaaggactcacaaatgaactgcatgttttggtccagttcagccgcttcaatttcaagtcgtgttaaacatttaccatagggcccctgtggctccgtaccaagtaccaaccactcctacggtgcattcatacgaaccttcataaaaagaatgaggatacaattctaggttctatttgaaccatcttaaat

SEQ ID NO: 2435 - DNA, 1452 bp, Zea mays
atggcgtggtcgtccaagaaggtctgcgtagtgggcgccggcgtctcggggctggtctccgcccgcgagttgcgccgggagggccacgacgtgacggtcatggagcagagcggcggcgtaggcgggcagtggctgtacgacccgcggaccgacgccagcgaccccctcggcgtggccggcgcgcacagcagcgtctacgcctctctccggctcaacacgccgagggagagcatgggcttctccgactaccctttcgtctaccccgcgggcaacgacgacgacggtgccggcggcgacgcccggcggtacccggggcacgccgagttcctgaggtacatcaggcgcttctgcgacgcgttcgggctcatggacgccgtcaggctcaacaccaaggtcctgcacgtcgccccgtcggcgccgcgcggccacggcgacggcagcgtgacgcggtggacggtgaggtgctcgtcgagacacggtgactgcgacggcgaggcggtcaccacggaggagacgacgttcgacgccgtcgtcgtcgccgtcggccagttcacccagccaaggctccccgtgatcaacggcatggacaagtggagcaggaggcagctgcactcccactcgtaccgggtcccggactccttccaagacgaagcggtggtggtcgtgggatgccacgcgagcggcgtggacatcgcgctggagctccgcgcggtggcgagagacgtgcacgtcagcgtcaagtccgtggacgacggcgtcgccgtgtcccccggcatgaggaaagctgcgtccaggcaccacaacctacacctccacccgcagatcgagcgcttgtgcgaggatgggcaggtaacgttcgccgacggctcgcgcgtcgtcgccgactccatcgtctactgcactgggtacggctactcgttcccgttcctggacacgggaggcctggtcaccgtcgacgacggcagccgcgtcggcccgctgtacgagcacacgttcccgccggcgctggcgccgtcgctgtccttcgtgggcgtgcccaagagggtggtggtgccacggttctacgagacgcaggcgaggtgggtggcggaggtgctgtcggggcggagggcgctgccgtcgtcggaggagatgatgcgcgcagccgaggggtaccaccacccagccagggagatgatggtggccggcgtgcccaagcacctggcgcatgacatcttcgacgactatgactactgcgacgagttcggggagaagcactgcgggttcccgcggctggagagatggaagaaggagctccggtggtcgtccatagcaagacaaaggggcgagggcgagggcgagggcgaggactcggagagcttccgtgacgtgtaccgcgacagcgacttggttcgggaggggttgcaggcacagggctggccctggccggctggctcacaccaacacaagtag

SEQ ID NO: 2436 - DNA, 1405 bp, Zea mays
atggcctgcggcaatgtactcggcttcggcgtacatgggaaacataccaaacaggttgcagagaccggttccgcaaagaaggctggttcacaactgaaaagccgcattgttgcagagaaacctgtggctgagtgtgcacaactgattgagcaactagaagatcagatttccatcatcattcgagaagaaaaggtggaaagagaagcgagaaaagctgaaatggaaattgcaaaggcagaaaatatgatagctcataaggatgagatatactcacggccaaagagaacctggtttgctactgaaagggaaaagaagcttttggtagcagctgctaaagaatctttgggtcaaggtaagagtacctctggaattattagtgctaagcaggctgaagacctccgtctgaaggagaaaaagagacgagagcatgagaaggacctaccaaggaagaaacgccgaagattagaggcccagcgagagatgctggaagatgaggatgaagatgacgaggaagcaaaggaaagtgatagagggaagaaactgaagaaaggccagtctctagtggatgctgcttaccgaaaggcaaagtcattgaaggcggctagcaaacggggtcctggtgcaagcaaaggaaagaaagagaagaatgcaagacaatattctgagaagactcctaacaggcatgaggagatgcgtgagctgttccagaatgatatgagtgaatggaaacagggacgctcctcaaagaaaaacaacaatttcgcgcacaaaaaatcaaaagcttttaatagcaaagcaagatacaagcgccgcaaatagaagactcggccatccccggatttatttacattctcgtctcagttttgactgactgaccctgaagaaatctctgggatccagatgtttccagttaccatgcgtttgcttgttgtaaacttcgtcatatcatgtattgaaacttaccgttttctgatgtctcattgatcttgggagagctatcctcagtttcgacatgtgccgttgctggtttcgtaggtcgtacttatctcaaaacttacttgccagacgttgttgtgtggaaacgtcgaccagcttgttatgttcctacgcctcgaatgcaatgacaagcttgcacccagtattccagattttgtggatgtgtgatgttggtcttttcgaaagcagattctcatttcaagagctattttagtgaaaattgttgtaaccatcttaaaaatgggtcaggcgaagcagtagtggaaaatgattcttttttttggttatatggataagaaaaggggttgagagccatctcatcgtgatgagctagttatgttgaatgggccaacaatcacatcatctccaatcatcattctttgttttggggaaccattgagttttaata

SEQ ID NO: 2437 - DNA, 2640 bp, Zea mays
atggcctgtcatctctgtcccctcttcaatctccaactcttgctgctgctcggcgcggttctcgggaacgccgacctcggccggggcggcggagcggaggcttcagatcgggcggagccggactcgtacttgatcctgatgtggcacgactactcgccgtcgtcgcccccgctcccgcccccgcccccggacccgccgtcaccgacggcgacatgtgagggggacctccacgggaagtgggacttccacacgcgctgtgaggtctccgaggaagtggagctggacggcgacgtctacatcacgaggaacggcagcctcatgctcctctctggcgcctccctgacctgcgagaagtacgggtgcgttatatccgccaatttctcaggcgaggtgcgcctcagccgcggcgtctgcgtcacaaccggcagggtctcgctggttgccaccaacatcacggtcgctgaaacggtcgttgtgaataccaccgcgctcgctggtgatccgcctgaccggatcagtggcgttcccatggggacgcacggcgacggtggcgggcacggtggccgtggcgccagctgcttcgtcaagcaagggcagacgcaggaggattcatgggggcggcgatgcctatgcatgatgaggggggcagttgtccttgctgctaagcatgcgaaaacaatggtcgggaagccattgttgtatggaataggtaccctgttggtcatgccgctgaggacactgtatggagtgggttgtgtttttggcgcacggtggttcctctacaacatgacaagcgtatctccatcgctgcaaattgagtttaaagaaaatacaagaagtggtaccaacgagatgtcatttcctatcagaattttatctgatgcatatgttgtagtagagctctcatcaattgattcctctcatgttcttgtatcaaggatacttctgggcaagttacctgatggaaattgtaagatgtctagggattcgattcttgcagcggagcttccatctgcatactctcgttttagttggaaaggcctctctccacgagatctcctttgctcattttgtcgccttcagaggttgccagagccccattttgatgtcagtagggtctcctgtgatacattaatgtcagctttgagctctgaagaaagaggagcgccagcaggcagcgcagaaaatcagtacaccaatgatgtcaggatcaacaaggaaaaaccagatctttttaaatgtgaagtgaacatacgttcacggaagcaagaaattttactagagtattctgcagctgacacttggagcaaggaatctaatgctattcagaattcttcattgaaggtcttgatttggttcaataattattttaagaaactaacctcaaaaacaggcaagctatatctttctgagtctactgctggtgtcaaggtacattcaaatatttttcttcaagagtttgcaatgtgtctacctgtttatggcaagaatggaggcagttattcagcaatgtgcagtgcagttggatcattttctatggatacacaaaagaagcaccttgaaagcactgcaaagttaacacgcattgaaggtccagactctggtgttttcccgtcccatggatcattgacttgtataagttatactgcttcccttgtgacgaaggataaagcaaaaacatatttgttggagagccacaatgagtttgagtttgagattgggacgggtgctgttagtaatcagcttgaatcatgtgtaactcaactgtcagtgaatcaaactgcacgttttgtagctgaactgcctcctagggatttaatcatggctgcatcttgtgagttctcacatgacctctccaatgtatctagcgagagctgcttcttggagttctctgtaaaggttctgcaggtaactgaaccattagaagatagaatggagaaagccctgttcagtcctccattatctaaacaaagagtcgaatttgttgtacggcacatcaacgagctgcatgttaccacacttgttgattttggctgtggatctggtagccttcttgattcgttgttagagcatccaaccacgctggaaaagcttgttggcgttgatatttctcgaaaaggcctcacacgtgcagcaaagagccttcatcagaagctgagcaaaaaatcaacgacgcagacaaatgttccaactgatgtgttgtatgacagatcaataactgactacgattctcgcttatatgggtttgatattggcacttgtcttgaggtgatcgagcacgtcgaggaggaccaggcgactttatttggcaacgtcgtcttgagctcattccgcccgaccatgctcattgtttccacaccaactacaaatacaatcctatcctccagggttccgcaatcacgaccacaagttcgagtggaccaggctacagtccagtgctgggctactggcctcgcggtgaagcatagctacagcgtggaattctccggcgtcggtggcttaggcgaggagccaggctacgcttcccagatcgctgttttcagaagactggtgcagggccaggaagcgatgtgcctggacaaggatggcgatcagccttacgaggttctctgggagtggcctaacgcgtgtgtgaactag

SEQ ID NO: 2438 - DNA, 468 bp, Zea mays
tagctgaaaatatgtggtttctgaaaactgaagataagttgtcaagtctagagaaagtacttcaatacattacatcacaaacaagtctagagaaagtacttcaatacattacatcatctgaaaactgaagctagcctggaaactagtttaagacatgacatctgtccttattttctagacagcgttcatcttcttctttggagtcagttttttgatagcacgcctcactctcttctgtggggtagtaccaactgtttcttgtgggggcagtctggagcgccggcgaggggcgccacggagctgtcgggagcgccggcgagggccgggagcacggagcagtcgcgagctcgtcgaggagagagcaggagcgcccagttcagtcgaggagacgagcagcgctcgggtagacggacagagagggagaggaagaaaggagcgagctcgcgatccgttttgccgaacgggaaa

SEQ ID NO: 2439 - DNA, 964 bp, Zea mays
tcgcttcgatagctaatttcgtcgtcacccgtcagaccgacacggaggtaggagaggagggacgagggaggggaaaagagagatggtggaggcatcgccggagtccggcgccgcggcgaccggaggtgcctctagtacggcggcggtgcggaaggggaagtcatgcaagggctgcctctactactcgtcagtgctcaagtcccgcggttacaacccaatctgcgttgggatcccccgctccatcccccaagttcctaactacgtggtggatgaacctaaggaggaggcgacggcgcaggggcatgacctcaggcggttcaggtacgggtgcgcgggttactccatgttcgtggacaacagggacggccagggtggtgagagcgagggcaagacgttgttgccatattgcaggggcctcgagttattggtggacagcagattggtcgagagaaagccatcggcaactgaacaagctccagcacatgttgcaaaggatgcagcagctaccatccgctctcaccaacaaggacaacagagacctcagaacttgtcgaggcaggaattcttggacaggaaaaggagcgctggactggtcgcttcaggtgttgcgaagaatctaaacaaaacagccaattatatcaaagaaaatattcaggacatgtacaccgatcgtcgtccaccaaagtagcaaccatgccgagtgattgtcgtcaagagctgaagaaatcgcttgctactggaaactttacatcaggactacctggaaactttactccactctcctcacttgttaaacgaaatggagcttttctgggataccaacttccttttctttacctgcataatcttgtaattttgcggctgtatatgtacatgcaaacaacttctttgaagcgaaaaatcagatctcgtttggtgtattgatcaatagtgtcagcacgtcacactgcagttcaaaggggcg

SEQ ID NO: 2440 - DNA, 778 bp, Zea mays
cccgcggtacgtgccctccttctcgcgctcctaaacaatcgcccggcctcctccccttccattctaggctccgcgtctcgctgtccccactccgtctcctccggctccgtctcatcccgatgccgctccttctcatcgtcgtcgtcccagtcccggagtcgctcccctcctctggctaagcgcagccttgatgtgtcggcaactggagtatttggtacgagactgcttgatccagataattttattacacttcaggcgtggcttgtgtgttcagactactactgttgaatacagttacaattggtccttgtggccctcaacagtttggatgctgtcattcagcattgaacagagccagagtctggtaacagtttttaatcatgttcttgataggatggatacatctgttaaatgtgtgaccctgcattcagaattcagatcgacacctttgattggttccaattccctgctgctggcttattatttaactttcctttttgcagtttctataatagcagagacatgcgctaaccagcatttgctaacccaatcaatttgttggcatcattttattgatcgaatccatcccgcctcatgcttttgcttcgccctgttaacatgtttttattgctgccgtgggctcttcgcaatttaaagttctctcgtatatgaagtcacatagttacatgacgtacattctacttgaacatggttgtttggtatttttctcatgaattgtaatgtttcttatgctggttctctttatcctgggtgcatt

SEQ ID NO: 2441 - DNA, 1707 bp, Zea mays
atggcgtttaggcgcgttgatcccgaacccttccttcctccgggcttcagcgcttcggtggtccttcaccgggaaattatggcgaggtcagtttctcggcgcctcccgccattgcatgaggactgggctatcatcagcattcaacctttacctgaccatgagattgctttcccggcggtgagggatgtggttagagaataccttgtggagcaccgtcggcttggggtgcgtgatatccagcggtcgcacctgggacaggttttggtccagttcagcagcattcttgaaagagacaaccttgttcttctcggtccgcagcagtatcttgatgcctccttcactgttcagcgacacaatgatgcttggaaccatagggccctgtattttaatcgggaatgttggctcatgttgttgggattccctctggattaccgttcttcagagcacttgcaggtggctattggctcctttggcagattgattctgtgggaagaagacagacgcaatatttataggactttgctcagggttcgggtcacgtccctagaggaggtcccacagttcattgttttttcagacgctgatggctttcttggagattcatggacggtgcagtgtgagatcatccagcaaactctgttgggaggtcagcctcaagatgatgacccagtgccagcggccccggcggatggacaacagcttccctttgagttttttggcctgggtcaacctgtgacggcggtgggctgggatcttaattttccacctgatgacaacgttcaagctcaacctgcagacaacattcaaggtgactgggaccagtggattgtcaatgatccccctgttcaaccacctctgcagccccttctggaccagccacctgatgagcagcaagtcagcaacccccattcggacctgtcctcagatagttcttctggtcacattcatggtgccttgctgcagaatgggcagcttctgaatgggaagattcctgaggatccggtggctgtggggccggtgccaaactttaatgcccctgccgaccatcccatgattgggccccaagaggttgatggcccacctatgcaggaggttcctcctgtgcctggagatatagttattcctgatgcccaaccggtggagccccttgtgaatgggcacaataacgtggggttgaactttatgttttcgcctggctggcattcggatcctgtcttgttgagtcatttagagaggaaaaggaatgcccagttttacaggatctgggagaaattttttgctccagccgactactcagcgacctcggtgcaggtttccaagaaatgggcaccttttttcttatccaacttgatgcacgaggattcctttagctggtccaaaaagttcctgtcctcagatattccttcagctttgttggagccagagtctatgtcactcccttttgtcatccccaggaagtgtcctgaggacaagttccttgatttggctgtttctgaggaatctgctgatgacacctctgtcccttcggacacaacctcctccaagcccaatattgctattgtggaatcagacctgaggagaagtaagaggcttcacgacgcccgggctggtttcaggcaaggctcttgccaaaaaaagaattgtttgatgtgtcagcacaagtgtgagggcccccctcgctttcagctaaagctatcaggcgcttag

SEQ ID NO: 2442 - DNA, 1031 bp, Zea mays
ccagccgcatcggcggcccctctcgtgtgtctggaaaccctagccgccatatctcacgatccactcgagcaccaagccgagggaaggtgaggagcgatggcgcgcggcgtggtgtcggcgaagggcggcgcggtcgcgggcaagaagaaggggtcggtttccttcacgatcgactgcaccaagccagtggaggacaagatcatggaggtcgcctcgctcgagaagttcctgcaggagcgcatcaaggtcgccggcggcaaggctggcaacctcggcgactccgtcaccatctctcgcgagaagaccaaggtcaccgtcacctctgacggacccttctccaagaggtacctgaagtacttgaccaagaagtacttgaagaagcacaacgtgcgggattggctacgcgtggttgctgccaacaaggaccgaaacgtctatgagctccgctacttcaacattgctgagaacgagggcgaggaagaagattagattgcactacgcttatattttagtattgaactcgttgcattttgatacctgtacccgtagtttcgcaaatgtcccatgttatggtgtggtatggttaatttgaagaatccttatgtactgaatctctgcaaaaagctatgttgtggacagaagtgtaacgtgccggatttcttgcatttcttagggctattttgagaaccctattttcttaaggggtttttatttttaagtgaaattagtttagtttttctttgagaaaaatagaaatcctttagggctgatttggtggatatggaattggagggaatcagagtccatatttaaatttgaatagggaggtgattcctcctccttcgttccctgtcccatcaaatcagccaggttagtttggaaactccataagcctatatttggataatttacacttcaatcccctcaccctatgcatagggtgaggggattgaagtgtaaattatctaaatataggcttatgaagtttccaaactagcctttaattgttttatgtatgctcgggggccaaa

SEQ ID NO: 2443 - DNA, 2120 bp, Zea mays
aacactatcgccgtataatgagatttggcaggatgaatcaacgtgccgcatgcttgtgctactatttgccatctgaaccatgtcgtcgcggcgacgccagtcatcctcgtggcttcacagtccatcgacgggacaaagctgtgaatccatcaacggagtccccggattccttactacattcgttcgttccacgccgccgtagaaagcaacccgaagtccccaacgccaccggcaccggcacggcgaactcgggcacgcaccgcagccagccggccggttcggcaggcaggcaggcagagaggattgcattgcactgcttccatctcccctgcccgccccgccgcggcagatcccgaggcggctcgcacttccaggtcaactcaaagtacgcccgcgcccgcctagacgttgtcttccctccctgcactccccgccacgacgccgcagcagatccaccatcgacgcgcgcgccgcgcgccccgacgcggaacgctggatcccgcgcagcaggaggcggccaaccagtcgccgtcgcccccggcccccaccccgcctgccgcagcaagcggcgtccgctaccgcacgccctcgtccccggacctcctcctccccgccgacgccgccaagatgcgccgctactccgcgctgcccaacggcggccgccaggagacgctggccgaccgcgcgcaccgctaccggggcgtcgtgctcgtcatcctcgccccgctcgcgctcgtctctctcgtcctcctcctcatgccacgctcacccgctggcaccatgggcggcgcccggaggtccgggccggccggggcagacaggtacgccgtcatcttcgacgccggtagctccggcagccgcgtccacgtcttccgcttcgacgccaacctggatctcgtccgcattggcagcgagatcgagctcttcgtccagataaaaccggggcttagccactatgccaacgacccccgggaggctgccgagtcgctcgtctctctccttgacgatgccaagcgagtggtgcccgccgaattgcgcgaccaaacgcctgtcagggtcggggccaccgcagggctgagaaatttgggtgcacaaaaatccgaggcaatactgcaagcggttagggaccttcttcgcgaaaagagttcctttaaaaaccaaccggattgggttacagttcttgatggaacacaggaaggtgcatacgagtgggttactatcaattatctgttggggaacttgggaaagacttatgcagacacagttggagtagtcgatcttggtggtggatctgtccaaatggcatatgctattgcggagaaggatgcagaaaaggctcctaagccatccgatggggaagatgcatatgtgaagaaactgtttctcaaaggaaccacatattatctttatgttcatagttatttgcattatgggttgctggcagctagagcagaggtcttaaaagctggcaatggcaatggttacagcaactgtatgttagagggatttcaagggcaatacaaatatggcgacaattcatttgaagcatctgcttcaccttctggtgctagttattcaaaatgcaaggatgatgcagtgaaagctcttaaggttgatgaagcatgcacccacatgaagtgttcttttggtggcatttggaatggtggtggtggtgctggacagaataatctctttgtagcatcctttttcttcgatagggctgctgaggctggatttgtgaacgccaatgcacctgttgctaaggttaaaccctcagacttcagacaagctgctgagcgcgcttgctctttgagtgtgaagaacgccgaggctacctttcctggtgtccaaaaggataacattccatatatctgcatggaccttgtttatcagtacacattacttgtgcacggattcggcgttgatccagaccatgagatgaccttggtaaagaaggtcccctacagtggtgcatatgtcgaagccgcatggcctcttggcagtgccatcgaggtggcatcttcatcatagcaaggagacacagtttagcaaggtaacatcggacggcattgttgtcatgaagttttagcgttgggagtcccccccccccctgaccgctt

SEQ ID NO: 2444 - DNA, 6888 bp, Zea mays
atgcccgaacaaggaagtggggttgatcatacccagtcgaagccaagggtcatttccaatgttgatgacgatgacggtgtcgtatttgaagacgacgctgatgagaacgagggatacctattcgctgggcaatatgaggataccgatgaggatatagaggtcgatggtagtcaagatgaatcgactgccactgatgttcctgacccgtacgacaaggtgtacagcaacatccctgaagaaacacatatgctcaagactgttcccaactgcggttattgcaccgcgaagaagtttgagtatgagacacctggtttttgttgtcgtggtgggaaggttgagctagccccactggagacccctccccaactcaagaggttgtgggatagtgcagactctgatgctaggcactttcgtgataacattaggttttttaatggccatttctctttcacttccctatactgttgcctcgatagtatgacaactaatgtaagggattctggtatatacacgttccgagcacagggcatgatgtatcacaatatcaagtcatttggtagggatggtggggcagagcataaacaccttgagctttacttttatgatgatgatcccactctcgagcatcggtaccgtaagtgtcgcgaagagcatcaacagaaagacaaagaggttattcgacagatagtcgacatactacatggaaacccgtactccgagcaccttaggaccatgggtcacgttgagaaccttgatgactatcgtatcgcgttgaacctagaccagacgttgaaccagaagacatataacacacctctcacttcggaggtggccgctatctggatcgaagggagcgaagggcgaggccagttcagcaagagtgttatgctccatgggaaggacagttcaagccactgcatccgctcataccatggatgctacgatgcactatcatatccattgttcttccctagaggcgaacttggttggcacgcaaatatcccaaaggtcggagtatccatggacgaagtggatgcataccgtgcgacacatagggcaagtaatgcaaatgatgaagatgcggaatctcctagccatttatgtgtgtctgtacgtgactactactgctacaaattccagattcgccccggggtattcaatcctatacttcatggaaagcggctttttcagcagttcgcggtcgacacgtacataaagattgagaactctcgtttagattacatacgcaagaatcaggatcggttaagggcagacctgtaccagggcttggtggatagcatgctagatggagatattagaggagagaaggtcggcaagcgaactgtgctgtcgacgtcgtttatcggcggtcctcgtgacatgagacgtcggtatatggatgctatggctctggtgcggaagtttggtaaaccagacatatttcttaccatgacatgtaaccctaactgggatgagataaggagggagcttctccctgggcagacaccgcaagatcgttcagatcttgtagtgcgtgtctttcatgcgaagctacaagagttaaagcatcggctgactaaacaggatattcttggtaaggtccgagcctacgtctatgtcgtggagtttcagaagcggggtttgccgcatgcccattttctactcataatgcagaggaagtacaagctcacatgtcctgagcagtacgaccttttgatctcagccgagatcccaagcaacaagtaccctgaactacgaaagatggttatcaagcatatgatgcatggcccgtgtgggtcgctaaaccctaactgcccatgcactaagggtcgtaaatcgtgcaagaatcattaccctcggcctttcagtgacacaaccttgcaagggaaggattcgtaccctatttatagacgtcgtgacgatgaccgtaaagaaaaggtccgagggtgcgaactagacaatagatgggttgccccttataacccatacctccttcgtctcttcaactgccacatcaatgtcgaggcatgtgggagcatcaaggctgttaaatacctgttcaaatacatatacaaaggccatgatcgtgcgtctgttgttatgagagatgcgagcaaggcagatgatgatgttgatgagatcaagcagtatagagatgcaaggtgggtgactcctccggaagccttgtggaggatatacggctttgagcttagtcagatatctccacctgttatgcagcttcaactccatcttccaaacatgcacatggtggcgtttcacgagcggcaaatggtcgagcgagtcgtcaaccgtccaggtgttgataggtcgatgctcacatcatattttgaggcgaataggctacacgaggaggctcgtggcatcctatatcgtgacttccctgagtggtacacttggcagagtggtaagggaaaagtatggcaacagaggaaacgagatacaggtggacaagtcggtaggatagtctctgctcatccggctgagggggagcgctactatcttcgtgttctcctaaaccacgtgactggcgccgcctcctatgtggatctaaggacagttgatggtgtcaccctaccgacttttcgtgaggcagcagagagaaggggactacttgagtcggacaacacactggatgagtgtctcactgaacgtgctcttttccagatgccatcgtcgctgcgacggctttttgccacaatactggtttactgtgagccaagtgatgtggctgtactctggcagaaacacaaagattctatgtccgaggactatcaacacaagagtcagaacaaaactcatgttgagcagatggtattgattgatattaggaacatgctgcagtcaatgggaaaggacataaagacattccctctacctcctatgatcgacgcgtatgacgatgctattggtactgctcgggaggtttacgaggaggaaagtatccaaccgacagtggaagatgtggctcttaaagactctcttaacgaggaacagagggccgcctatgataagattatgtctgccgttgacaccgatcagggcggattattctttgtggatggacctggtggcaccgggaagacttatctatacagagtgctgctcgcgacgctacgcaaccagggcaagattgcagtggcaacagctacatctggcgttgcggcttccataatgcctggaggaagaaccgcccattcacgcttcaagataccactcactattgacgatggcgctgtatgtagcttcacgaagcagagtggaacaacagagttgctacggaaagcatctctcattatctgggacgaggcttctatgactaagagacaagccgtggaggcactggacaatagcatgcgcgatataatgggtcgccccgcactgccatttggtggtaaaaccattgtcttcggtggagatttcagacaggtcttgcctgttgttcgtaaagggtcaagggctcaagtggtcgcatcttctctacggatgtcttacctatgggagtccatgtcccacttaaagcttgttagcaacatgagagcaaaaaacaacccttggtttgcggagtttttgctgcgcgtaggcggtggaactgaggaaacaaatagtgacggcgacattcgtcttcctgatgatgtgtgtgtgccttacagtgggagtgacaacgatcttgacaacctaatagactttgctttcccaaatctcaacgaaaatatgtctgattctacctacatcacttcaagggcaatactgtcaacacggaacgactgggttgatatgataaatgttaagatgattgatcgttttcaaggggagcatatggtgtaccatagtttcgatagcgccatggatgatccccacaactactacccacccgagttcctaaacacattgacgcctaatgggctaccacctcatgttttgaagctcaagattggatgtcctgttatattgctccggaatatagaccctgcaaatggactttgcaatggcaccaggctggtcgttcgtggcttccaaagaaatagcattgacgcagagattgtactgggtcaacacgttggaaaacggattttcctaccgcgtataccgctgtgtccctccgatgaagagatgttccctttccagttcaaaagaaagcagtttcctgtacggcttagctttgcaatgacggttaacaaagcacagggtcagactattcccaatgttggtgtatacttgcctgaaccagtgttctctcatggccaactatatgttgctctatctagagcgacagcccgatcgaacataaagattcttgtcatcccagctgtcgatgggaggaaaaagtcaaggaagggtgtaaagaaaacccccaccgtagattgtggaacatataccaagaacatcgtctacaaagaggaaatcccttgtgaaccaagggtagaagtcgttcttattgatgatgcctttgttgaaaggaagtggatggagtgtttatttcagccgagcgcatatttaggtgacgaggttatagactgttacataaatttgataaaagctcaaaagcatctaaagtgccgatctggaggtcgcgttcacatagaaaatgctttccagttcaatttcctgaagcgagatggtgatcttgaaattaaaacagaggagctatatccaattaaagacatggcacacatatgtagcgctgaacgaagggtgttactttacctagaccatgacatgattaaaggactgcaaagacaaatagatatgatatctcaatgtaaggagttaaaagaccacaggtggccagacctccaagttgcttcttggccgctcagagaaatagacatgggatatgcaaagcagacagatagctcttcatgtggcctctttcttttgaactatatcgaatactggacaggggatgaactgtctgacagttttacccaggatgacatgtcacactttagggaaaaaatggctgctatattactatcttcagacctgaataagagaagggggtgtctgttatacaaaaatgaaaaagaagttgactctggaagcccatctgatgttgagatattagaaaacccaacagattctaataagaggaaactactccacgtgcttgatgatagcgaagtagtgtatgaagatgaggaaggccctattactcaagcagacttgcaaaggtggtttgttgatgattgggataaaagagctcctgtaaaagtctctaccgatggttgcaccaatgactttttaatggttggtctttccacaaaggacatgccagtgaccaaagccgattcaatagatgttttatgtgattatatcatggcaatagaagacgatacgacactagaatgttttgacatggctgttcggctgcttgccaataaagagtcacgtaggccgaaagaagaaatcataaataatagaaagcattatatggacatgcgtttttggagaatggttggttttggtaaacttccaaagtaccatcaggatcctacaacagaagagttagccaaaacactcgattgttggccatcaatgaattattatatcacaggttgtagatatgttctcatgccatggaaattcaatggttgtcacgcccttttcgtaatagatcatgttaaaaagcatgtgacttttatcgattttacaccgactcaagattggtgtaaacacatgccatacaagaggttcgcggaagcgattatcatggcctcaaaaaaatataagattgcttacagcaagaaacgttctggatgggcggaggatatctttaagtgggaacatacaattcagactggtgttccaattgacttaagagggtttaataccagctacctcgttctacaagctatggccatgtgggggaatgacagacgactgaaatttgttggggttgctcaactttattctggtttggtgaaggtaccacatgatgtcactggttgtatgataacagctagaaaaagaatgccggtaacagccggagatatgcacagccgatacattcctcagcaagattacttctcagagggactctacacgttcgatattgggcagaatgaccttgctggtgagttctattcaagaacagaggaccaggtcatcgtttccattccaactattttgttggaatttgagaatggtctcaaggctgttatctctagcagacggctgagtaattatttatctactccagagcatcactcatccgagttaaatgcctctgctgaccttttaaaccaccactttaagagatataccaaaaagccagatgctcttcagaaagggattagcccaagtgatgatgcattcacactgggaattgctccagctttagcaaaggagcatcttctaaatgcagaaaacaaaggactgttgtgcagagatgttagtccagatggattccgcttttttagcaatttatttaaggtggtctttgttgaagcaactgaagcccaatacgcattcaaaaaactattatatacacgatataaggatactcctctgtatttggagtgtgcacctgaaaacatattgtctcctacctcagcaccggtggatgaggaagtaaaaaacgaagatggcaagcatattcttactaaagctaatatagatcaaactgtagaaggagtaagcgctgaagatattgatccagatagagtggaggtagcaagtgatgctcttcagaaagggattagcccaagtgatgctgcattcacactgggaattgctccagctttagcaaaggagcatcttctaaatgcagaaaacaaaggcctgttgtgcagagatgttagtccagatggattccgcttttttagcaatttatttaatgacattgatccccaaaatattcactcgtaa

SEQ ID NO: 2445 - DNA, 1114 bp, Zea mays
ctcgcgcgccccacctactgtgccgtccgtcccgccattggcacgcacgagcccacgatataacccgccacccctcgctctcccataccagtaccaccaacaaacttctttctcgccttgcatcggccgccggccctccatccaccgcaccagctagcaacgacgacacgctagccaggtagcgtagccgaccggcctctgcgcgcgggcattcagttcgccatggcgcgcctgctccgcgccgcggccggcctcgcgctcctcctggccgtccttgccccggcggcgtcggcgggcggcgacctggcccagctgggcgccgccgtcgagacgcggcgcggcggcgggcggacgacgtgccgcggcggcacggtgggcgagtgcatggagtacctggacgtagacgcggagggcgaggcggacgtggcgggcatggccaccggcggcggcggcggcaagcgccgggtgctgcagggcggctccggctacatcggctacgacgcgctgcgcagggacaacgtgccgtgctcgcagcgcggcgcgtcctactacaactgccagcccggcgccgaggccaacccctactcgcgcggctgcagcgccatcacccagtgcaggggctgatgcctgcctgatgatttccgttccgtttcgtccccagctattagtcgggtcttcaatttaaagaagaagacatgcatggagcgatgtcgtcgtctttgctgtgcgcgctatagcctttctcgtccgcctgaggcacgcatgactcgtccgtcgattattgtgctgcagtggacatgtgtatgtgctcctgtttctagcatatccccttgctttcaggaagaaagtgaaagtaattatatatatgatgatcgtgtaataattttcgtctacgagggagaatgaccttgtcatgcagaaaagatcaattcaagtggctcagcgttcggattagtggtttagatatatactctttaagactagtcattattagttcatgccaccaactgtggttgggctgtcatttttcatcatatgtggagagtgagtcaatgtacctagctaggagcgttgttgttggcataaataaaagcagattcgtttgcttttcaga

SEQ ID NO: 2446 - DNA, 2232 bp, Zea mays
cgaaaagcccaaaaattacagcccatctatattttacgcctttgcgtcgcccccaatccttttcctccccgtcgcggcgtcgccggctcccacggtccaccgacgactcttcttcctcacctcctcccgctccagctccagctcgtctctctcctcgcctcgcgtagggtttcgcttcccgtctcgccgccgtcagcatgggggacaactacgatgacgaaggcgagccgatcgtgaacctcgacgaacgggaaccctcccctgagcatcagccgtacgaagacctcgatgacgacctcgacggcggcggcgattggacccgcgaccgctctccgacccccgtccacggcgacgacggcggggcagggtcctcctccaagccccgaaagcgccttctcaagaagggcggcggtggaggcatgcccggcgatgacgggctggatgactttgggttggaggacgaggacgcggacccttcggctgaggcgaggaagaggaagggctcgtcgtcgctgagggacctcgcgaggggcggggcgggcagggagaagaaggctaagaaaatgcggatggaggacgacgggagggggagggacactgggatggtgagggataggcggggatcaggaggaagggactcaggcggtagggatgaccaggatgatggggagagggagatccaggagctctgggataccattgctggtggtgagtcagaggatgaccaagaaggtgttagaaccgtagatgatgataatttcattgatgacactggagttgatccagctgatcgttatggcagcgataatgagcgacattcacctggacgttatgcacaggctgaggagggtgaggaggacgatgaaatcgaacgactcttcaagggtggtaagaagaagaagaagaagaatgatcgccctcgtgcagatattggccttatagtggaacaattcattgctgagtttgaagtagcagccgaagaagatgcaaacttgaataggcaatcaaaaccagccattaacaaacttatgaagcttcctctgctcatagatgttctctccaagaagaatcttcagcaggaatttcttgaccacggagttctcactcttctaaaaaattggcttgagccattacctgatggaagcatgccaaacatgaatattcgatctgctgtactgaaattattaactgattttccaattgacttggaacagtatgaccgaagagagcagcttaagaaaagtggtctgggaaaggtcattatgtttttgtccaaatctgacgaggagactactgcaaataggaaattggctaaggagctggttgataaatggagtcgaccaatattcaacaagagcacgagatttgaggacatgaagagatatgatgatgaaagagcaccttacaggcggccacaaatgaagaaaccttcatcgagtagctctggaatggaatccagagatgatgatcttgatgctgacttttcacaacgcaagtctgggcaaagtagttcaaggcagcacgcttctaggccggaagcctcgcctttggactttgtcattcgtccacagtccaaaattgaccctgagcagatacgggctcgtgctaagcaggctgtccaagaccagcgtcggctgaagatgaacaagaaattgcagcagctgaaagcgcccaagaagaaaaaccttcaggcgtcgaagctcagcgtggaaggccgtggcatgatcaagtacctgtagatcacccgctatggcatccgcagtcagcagtgcccagcacattatacaggacctgcatgggcccagggattgctggattactaagaagcatcctatcaccattccatggcaaacagcccggcatcaataattccttggatcttttttccaaatatttttcttgcctggtagggtgcagcatctgcgcttcagaaaccggttgatttgagcactatctatgagcatgtataaatatggtgcttttcaagcagagtggtgcctttatattgtataaaatatttgtcatgcttatgagttacagttaactctgtctatgttgtctcgatgtactaggtctcaagccctcttaatggagggttgtgatagggtaagcaagtcaacgttaaatctccataaaatgataggttaagcgagtcaacattaaatgtctccaatttaatggagatgaaatccgaaagaaaggattctgttgaggcgtaattcttggatccct

SEQ ID NO: 2447 - DNA, 2351 bp, Zea mays
atggccagatatagtggtatttttgggaagcctagggtcaatgatataaagttagggatatttagtaagcaattgctgttttttactctcttcttatcgtctgctggcaacaggtatggtggtggcaagatcagtgcctctgggggtgatggtttggctgggggaggtggagggcgagtttctattaacgtttttagtagacatgatgacacccagatttttgttcatgggggaaggagttcaggctgtccagataatgcaggagctgctggaactctttatgaagcagtaccaaagagtcttattgtcagcaacaacaatttgagtacacagacagatactcttcttttagagtttccaaatcaaccactgtggacaaatgtttttgtaagaaatcgtgccaaagttgctgtccccttgctctggagtcgcgttcaggtccaagggcaacttagccttctttctggtgctattctaacttttggtctcactggttatccatactcggagtttgaactgatggctgaggagcttcttatgagtgactcaataattaaggtgttcggtgctttgagaatgtctgtaaagatgctcctaatgtggaactccagaatggaaattgatggcggtggagattcgatagttgcaacttctttgttagatgctagcaacctgatagttctgaaggaatcatctgtgatacactctaatgctaatcttggagtccgtggccaaggtgtcctgaatttgtctggggacggagacacaattgaggcacaacgccttattctatcgctgttctacagcatacaagttggacctggttctgttttacggggcccacttgtaaacagaagtagcgatgatgtggccccaaagctgaattgtgaagcagatagctgtcctgtggaaataatacatccaccagaagattgcaatctaaattcttcattgtcgtttacccttcaggtatgccgtgttgaagatattgatgtatggggtgtcgtacaaggaactgtaattcatttcaatagggcaagaagtgtcactgtgcatacatctgggaccatcagcgcaacaggctttggctgtcgatctggagtaggacaagggaaaatgttaagaagcggtgtatgtggtggtggtggacatggtggcaaaggtgggaatggtttttataagggagaccttgctgagggtggagctatctatggcaatgctgatctaccctgtgaacttggcagcggcagtgggaatgactccacagagttgtccacagctggcgggggtataatagtgatgggctcatgggattattctttgccaagtcttgccctctatggttcagtagaatcaaatggtggcagctatgctagtggctctgttggaggacctggtggtggttctgggggcacaattcttctatttgtgcacactttgtccttagctgaaagctctgtcctttcaagtgttggtggcttcggaagtactggtagtggtggaggtggagggggaaggattcattttcattggtctaacattcctactggagatgaatatgtgcctgttgcagctgttaagggatcaatacttacaagtggaggagtcagcaaagggttaggatattccggtggcaatggaacggtcacaggaaaagcttgcccaaagggtctttatggtacattttgcaaggatgtcaatagagcaaaagggcgtttcttctttcaggctttctgggtcaagttggaaggctttcatgatactgtggctctggcttggagttcggtggcgccaggtccctgtccttttgtcactctctccaggaagttgcaagctaccgctagagctttgcaaagttggagtgcgaaaacagtgggctgtttgaagctgcagcttgagatggctagggaactacttcatatgtttgagatggctcaggagcttcgggttctgtctcctgcggagggctggttccggcgtgctttgatgaagcgcattcttgcgctctcctcctggactagatctgtggcgcggcttcggtctcgtgttacttggttgagagttggagacgccaacacctcactcttccatgctcaagcaagattcaggaagaagaagaattttattgcttccctaactaccgccgagggtgaggtcttgacttcacacgatgacaaggcaacagccctattcgacttctatgatggtttgctaggtactgcttttcagagggatgtctctatcaaccttgatgagtttggggttgcagtcctttgatctagaaagcttgaatgtgcgtttctcggttgatgaggtttgggacacaatcagatcaaccccgtctgacaaag

SEQ ID NO: 2448 - DNA, 258 bp, Zea mays
atggacaaggagcgcgcgtgggtgggcgaggagggcacatgggtggccgaggagagggagcagggaagaggagctcgtggtggaggagggcatggggcgggttcatcggtggaggatggcgcggggcggcgtttggagactgggcgcacaggcggcggcgaaacccacacccccacgtcagctgccccgccaccaccaccgtctacacccaccgtcggtatctcgcccgccatcggtattggcgcccgagtagtgtaa

SEQ ID NO: 2449 - DNA, 3391 bp, Zea mays
ccgcgaccccaggtcagtcgggactaccccgctgagtttaagcatataaataagcggaggagaagaaacttacgaggattcccctagtaacggcgagcgaatcgggagcagcccagcttgagaatcgggcggtctccccccccgaattgtagtctggagaggcgtcctcagcgacggaccgggccccaaagttctctggaaagggacgccctgggagggtgagagcccccgtccggcccggaccctgtcgcaccacgaggcgccgtcaacgagtcgggttgtttgggaatgcagcccaaatcgggcggtaaactccgtccaaggctaaatacaggcgagagaccgatagcgaacaagtaccgcgagggaaagatgaaaaggactttgaaaagagagtcaaagagtgcttgaaattgccgggagggaagcggatgggggctggcgacgcgcaccggccgtatgcggaacggctcctgctggtccgccgatcggctcggggcgtggaccgttgtcgcccgcgccggcggccaaagcccgggggccctaggcgcccccggcagccgtcgtcggcgcggacggtatccgcgcgcctctggcgcgcccctcggggcgctgcgccgcaacggcctgcgagctccccatccgacccgtcttgaaacacggaccaaggagtctgacatgcgtgcgagtcgacgggttcagaaacctgagatgcgcaaggaagctgacgagcgggaggccctcacgggccgcaccgctggccgaccctgatcttctgtgaagggttcgagttggagcacgcctgtcgggacccgaaagatggtgaactatgcctgagcggggcgaagccagaggaaactctggtggaggctcgaagcgatactgacgtgcaaatcgttcgtctgacttgggtataggggcgaaagactaatcgaaccatctagtagctggttccctccgaagtttccctcaggatagctggagcccacacgagttctatcgggtaaagccaatgattagaggcatcgggggcgcaacgccctcgacctattctcaaactttaaataggtaggacggcgcggctgcttcggtgagccgtgccacggaatcgggagctccaagtgggccatttttggtaagcagaactggcgatgcgggatgaaccggaagccgggttacggtgccaaactgcgcgctaacctagaacccacaaagggtgttggtcgattaagacagcaggacggtggtcatggaagtcgaaatccgctaaggagtgtgtaacaactcacctgccgaatcaactagccccgaaaatggatggcgctgaagcgcgcgacccacacccggccatctgggcgagcgacatgccccgatgagtaggagggcgcggcggccgccgcaaaacccggggcgcgagcccgggcggagcggccgtcggtgcagatcttggtggtagtagcaaatattcaaatgagaactttgaaggccgaagaggagaaaggttccatgtgaacggcacttgcacatgggtaagccgatcctaagggacgggggaaacccggcagatagcgcgatcacgcgcgtcacccgaaagggaatcgggttaagatttcccgagccgggacgtggcggcagacggcgacgttaggaagtccggagacgccggcgggggcctcgggaagagttatcttttctgcttaacgacccgccaaccctggaatcggttcagccggaggtagggtccagcggccggaagagcaccgcacatcgcgcggtgtccggtgcgcccccggcggcccttgaaaatccggaggaccgaattccgtccacgcccggtcgtactcataaccgcatcaggtctccaaggtgaacagcctctggccaatggaacaatgtaggcaagggaagtcggcaaaacggatccgtaacttcgggaaaaggattggctctgagggttgggctcgggggtcccggccccgaacccgtcggctgctggcggaatgctcgagctgctcgcgcggcgagagcgggccgccgcgtgccggccgggggacggaccgggaacggccccctcgggggccttccccgggcgtcgaacaaccgactcagaactggtacggacaaggggaatccgactgtttaattaaaacaaagcattgcgacggtcctcgaggatgctgacgcaatgtgatttctgcccagtgctctgaatgtcaaagtgaagaaattcaaccaagcgcgggtaaacggcgggagtaactatgactctcttaaggtagccaaatgcctcgtcatctaattagtgacgcgcatgaatggattaacgagattcccactgtccctgtctactatccagcgaaaccacagccaagggaacgggcttggcggaatcagcggggaaagaagaccctgttgagcttgactctagtccgactttgtgaaatgacttgagaggtgtaggataagtgggagcctccgggcgcaagtgaaataccactacttttaacgttattttacttattccgtgggtcggaagcggggcaccgcccctccttttggctccaaggcccggcctcgccgggccgatccgggcggaagacattgtcaggtggggagtttggctggggcggcacatctgttaaaagataacgcaggtgtcctaagatgagctcaacgagaacagaaatctcgtgtggaacaaaagggtaaaagctcgtttgattctgatttccagtacgaatacgaaccgtgaaagcgtggcctatcgatcctttagaccttcggagtttgaagctagaggtgtcagaaaagttaccacagggataactggcttgtggcagccaagcgttcatagcgacgttgctttttgatccttcgatgtcggctcttcctatcattgtgaagcagaattcaccaagtgttggattgttcacccaccaatagggaacgtgagctgggtttagaccgtcgtgagacaggttagttttaccctactgatgaccgcgccgcgatagtaattcaacctagtacgagaggaaccgttgattcacacaattggtcatcgcgcttggttgaaaagccagtggcgcgaagctaccgtgtgccggattatgactgaacgcctctaagtcagaatccaagctagcaaccggcgcctctgctcgccgcccgccccgacccacgttagggcgttcgcgccccaagggcccgtgccattggctcagcccgcccggccgacgcgccgcggcgggccgcctcgaagctcccttcccaacgggcggcgtgctgaatcctttgcagacgacttaaaacgcgacggggcattgtaagtggcagagtggccttgctgccacgatccactgagatccagccccgcgtcgcacggattcgt

SEQ ID NO: 2450 - DNA, 2295 bp, Zea mays
atgggtgatatacgtgattggatgtatgaaggtttcaagaagggtgggtgtcatacaagtgaatggtttgtcaagacgcagatgtttctggaccatgcagctgctttgtcacaaatagataatattaggtgtccatgcaataaatgtagaaatatgacgagccacacaaagaggcaggtcacactacacctgtgttcgcatggtttcgtgccaggctataaggtctggtatctccatggtgaagatgttgaacgagcagcagaagtagaagttgatgatggtgaagatgatgttgataggatggaccagatgcttgaggatctgcagcctgaactggcaccagatcatcatgattcacctacaccggagtttggggaggaaatgaatttgaatgatgacttacgtcagttatctattggaagcgtaactgccaaaagctatggacgttacgacgtcaatggatatcgctttcgttcaagcattttcgaatcaagtcatcctatggccgccactcaaaatagtggagtcgttactagggcaaccgacatggaaggacacgaagcctgctattacgggaaaatcaaaaatataatcgagattacatttgctggaaataagcctttagcgctagttttctttgagtgtaaatggatgccgccaaaatcaaagaagtcagtgaaggggttgttcaagggcctgggcctttttcagggcagttcttcgagcagcagcagacgtcgagagctattgagcgcggtacatggagatgaggatgagcagcacactgaggagcagcacattgaggaggagcagcacaatgaggctgagcagcacaatgaggaggtggagcacgtgacatgggaccaggccgcacagcatcaccagccatgggaccagtgggaccaccagagagagcagcaacaggcgtgggaccagtggggccaacagggcgaaccggctgacaacccgatggatgatggctcgggaggctcttcagcgacacgcacacgtcgctcaagaaaaagccactcagtaaagcctcgtcacgcgatagagcgagaggctgataggactttaatcatgccacatggagatcggaattgggaggacctgtcctttgacggcaagggacaccacactcaggttaaccttacgttgggttctctttgccgccttcactaccctggtatagtgaaggtgtcaaacggtgataccgaggatgaggtgctcgtcagtacctgggatgagtacaagtttaaaaaggaacgaaaccacaccgacagacagggacttgtgcgtaatgacttttggcttcgatatcggttgcctgatggagaggattacatggggcatgctgaacgtgccttgcaaaacaatgcaaagaagctggtgaaggatgccatatactatgcgagaattcaggctacaaacctgtattttcaaaagcatccggaagaagcaggccccttgaataaaaaggaagggtcctcaaagatatatttgactgaggatcaatatcgtgaggtgatggttccatggatggcgcccgtgcctgatgccgtactattcttggtgtcgatattgggcttccgaaggcttccagaaagcgaagctacgagtggccaaaagcctagtgacattgaggtctaccaggagggccacaaaggaccagacccgaacaaccctgaccagctctgcagccagacagccacggatcgcttggcggcatatggggaggagatggttcgtcgccatggccctgactacgactggcgccatgaaccggtggatccctcggtggtgtacgcaagtggtggtggcaaagcgcatggacgatacgcactcttcgacggattcattgactcgtcgtcggtgagatctcagaggacgggttcatcttcccgtagctcatgctctcgtcgaccgaacgagcaggagttggagattatgaggatgcgtgaagagatgagacaacaacgcgaatttatggaggcttgcaatgctcataatcaagcgatgtatcaattaatgcagcaacagggcatgacatcaaattttccaccgccaccacaatggagccaatttgcaaacacaccagttccaccaccacagttcaccacccctccgacacatatacctgcacctggagatagggttacgcctgaagcgggtggcagtgggtctgatccagcagcagggactggatttgttgactcgctctttgcgttccctcctcctggtggtgaaggcggcagcggtcaaagctctaaccacccaagtggtggttatctctaa

SEQ ID NO: 2451 - DNA, 953 bp, Zea mays
atcatttctgcataagcacagcaactcccggttgcagcagttttccctcaaaactttttgcgtcgcagcagcctttgcacatcggacatacttgaaggcttgaagctgtcgtccttacagtctcatcgaccgatgccacagcgacacatgcacgaacaagagcacctgcccgactgagcgtgcacgacctcgcgccgatcagggccaagaactcacccccgtcgtgtgtgccgatggaggtggaggccgacgggatccaggaagccaccgcaggcgcaggagacggcggcggcgtggacgatgtcttcttctgcgtcgccgcgacgtccaggggcaacaagaacagcatctcctacttccacaccaacgcggtcggcgaggacgccgagtcggcgctcgcgctcgccgcgctctgcctcgaccacgcccccgaccaccaccggtggcaccaccacaccgtcgccggggcgaagacgttcgcgttcctctcggccgacgacggccgcacgtacttcgccgcggccgacccgagccccggcgccgccgaggtggtccggttcctggagcgcgtccgcgacgcgtgcgacgccgcgcccaggaagcgcctgcgcgacgaggcggtggcccccgtcgctcgccagttcgccaggacgctgcgggcggcggcggcgggcccgagctcaggcgcggagctaccggaggcctcgctgcaggcgaaggagccgtccacgccgctggcgccggtctgcgagaaagacgaggaggagcgccagagggccggagagcgacgtcgcgccttcttgcagccggaggaaagcgcaagcgcgcttccggggtggcgcccgtggtggcgccacgcgtcggtcgtgatcgtcgtggatgtggtgctgtgcctcgtgctgttcgccgtgtggatgggggtttgcaaaggcttcgggtgtctgacgcgatga

SEQ ID NO: 2452 - DNA, 591 bp, Zea mays
tgttgtcaacatgtcttgactacggcccaggagaagacaaatcttggtagccaagtaccgacacagtgacacggagacatcatgattcatgaggcctgtccgtcgtctgggacagagaaagaaaaaaaaaaaaacatgatgaaacgttggtgcctaattccggcttcaacccagaccgacgccgaggagctcctccttttccttcacaccatgatcctccgactcggttgccgccgatcgatgcgatccatgggcagctcccatctgccgctccgccagctgctgcatcttcttcccggcggccgatcagcgatggggtggaggcgagggcgagggcgagcgacacaggcggcaaagggccagaggtccttttttcttgaatgcgcagcagaaagccgggctgctcccccggtgaggccagccaatccccgctgccgttccagaaagcccgggacaccgccggtccaaccccgacaagcgcgccacggggcggaagccatggcagcgttttcgctccggtcgtgtcttcccatccgtccgaccatcccaggatccatcatactagtgtttgatgcgcgccttgcgcgcgtt

SEQ ID NO: 2453 - DNA, 330 bp, Zea mays
aaaaaaatatctacattaatttatctgtaggaatgggagaaagtgatggaacgtcaaggttttcgccagttcgctgataagattcttgacattatcagctcaaaagaataatcgcctgccctgtttggtgggatcctgatgctggagtaaatagaagcatccaggaaaacaagcgaaagtggagtatggaagagcacatctctgttttcctttttcccgtgatggggtagagtggtagacttcagaacacatcttgagtcgcctgttttttccatgacggggtagactttagaacacatgttgtgtggtgtcgcctggtgaaaggaaact

SEQ ID NO: 2454 - DNA, 1806 bp, Zea mays
cccccccccccccccccccccccccccctgcgcagcacctgcacttcctcctcctcctcctccatggctgcaccttgcgacctgatccgccatgccctgcgtgtcctttcgaaaacggctgtcgacactgcccctctcgctcgctttccactcgattccagcaggcgtgcgtgcgtgcgtggcccaagtacccaacgcaccaccaggtggggcctctgctccaccccactccactttcactagcaccaacaccaacagcctcgccgccagcagcagccacgcgacacgacgcgacgcgagacgcggagcggtacaaaaggtggactgggtgggtgtggctggttccgtggttcaactcctaccactaccacagcaccagcgacggaccgggcaggcagagaaaaagcagaccagacgagacctctcgcgttccgtcctcctccctgcccctgctgccgttccccttcttcctcagttctcccgcccgctgctgccctccgtccgcgtccagatcccgccaccaaccgatccggcgccctccagcatggcgggggcgggggcgaaggcggcgggagccctggctctggcgctcgtgctcgcgctcgcgggggccaactcggagggcgacgcgctctcggcgctgcgccggagcctcagggaccccggcggcgttctgcagagctgggaccccacgctcgtcaacccctgcacctggttccacgtcacctgcgaccgcgacaaccgcgtcacccgcctagatcttggtaatttgaacttatctggtcatctggtgcctgagcttgggaaactggagcatcttcagtatctggaactttataagaataacattcaaggaacaatcccttctgagcttggcaatttgaagaatctaataagcttcgacttgtacaagaacaacatttcggggacaatacctcctgcccttggaaagttgaagtcccttgtattcttgcgtctcaatggcaatcatttgactgggcccatcccaagggaactcgctggaatatctagtctcaaagttgttgatgtttcaagtaatgatttgtgcgggacgattcccacgtctggaccatttgagcatattcctctgagcaactttgagaagaacccgcgcttggaaggtccagagctacaaggcctggccatatacgacaccaactgctagagggcaccacgaagaaaagaactgctagaaagtaacgagcgaacaaggttaccagaaattgggcgatatagatttactaggtctggatctgtaatcctccctgcatagctcttattcgtaactcgctgtcggcacgaaagttggtgtgtgttttagcagaatgctttctgtccgtgaaagtaaacttgaaactgcttattacgactgaaatgatattgtcgttcccccctgcgcccctgccatgagttttgggttcctttgtgttttgtacactgaacttgtcggaagtacggttcagtgaactagtttatccctgctgtggcaaatttatggaaggtggccgtgatatcgatcgactaaaccatggcacaaaagaagcaacaggcaatgatgtcctgtctggtggcgtctgcattaaggtagcaccggcaattcttgaacttgatgatcccttggttttacggacaatgcggtttgctgcaagctaaacaccatctactcttgccggcatgactttatggtgcaggtttggcacgcgtggctgcacttatgtacgcactactgtgcatggttgttgatgcacgaattagcctcagctggtaggtgtatgtaaaattggg

SEQ ID NO: 2455 - DNA, 2877 bp, Zea mays
cttgcttgaaaacaatctcacagaaaaacgctgatacaccatctgggataagcgttaggataggtacacacatagccacttataaggttgtccatatcgccaactcagaccattgcggacggagtgaggatgggcccttcctcccccgcgctcgcccctacggcgaccgagctccaaagcagcgccaccgccagatccgcccgcctccggccgtccccggctcctgccggctgcaccaagtcagatccaaccccgcccccccctccagcaccaccagctcgccctcctgtgtcccagctcccaccgccaccgccctcacatctaccgccggcccgcccttctgatccaactgcatgccgtgcgccggcggccccctaccaaaccaagcgggtgaggtttgcattcactgcaagcaccacgccgccccgcattcactacccctccgccgtatcccgcagccacagtgccacccccgccccgacagctggttcgaagcccccgtctggaagctgcgaccgcattgaagatgaggatcttgaaggatggacgacgattcggcgcaggcgtggacgcgccgcccgcgcaggcctaggctgcgccccagcggcgcctcgccttctctcagcccatgcccctagccgtctgatggtaagcctacgaggtaaatgcgctcgctgcttgagtagggatcacttggccattaattgcagggatccggtcaagtgcatcaaatgcaagcgctccgggcacaggtcttggcagtgctcgtggattgttagcaggccgactactatcccccaacgtcaacctccctgcctcgacttccacaacttcccgccgctcgccgctccgtccatggcccttccaggtgacccagcattgcgcccggatcattcctggaccaccacttctgccacccgcgtcatggagagtgagctcgaacggctgagctcccatgcagtggtggtttggctcagctgcgaccgccccgacatcagcctcgacagggtggagcgggccttctgctcccgctttggggtgcggccggtggacatcacggtatcccgaagcccacctgcggacttcctcgtgatcttcgcgcaccggcaccaccgggatgcggccgtcgctgctagggacttcccgcttggcaaccttgacttccgcatcaggccgtggcagctgatcacccttggagaacgtcacgacctcagcttccacgtgaggctgtgcctcgagggcatccctcctcatgcgtggaatgaaagcatcgccaagcgtgtcgtggcccgtgcctgcgtcttggactacgtcgaagacgactgcctctcctccaccatgaaggacgcccgctgcctcaacctttgggcgtggacagaaaatccgtctgacatcccgaaggtcatctggcttacaattactggctctgtgatggtgatccatgaaggtgtgccccctccagtgggccaatgtggcctcactttccgggtgcttgtccacctcgacttggtggaggggccgccgggccgcgatgcgcttcctaccactcgctccctcacctggcgccatggtgtcgtcgacggggagcgcgtgcgacgtgaccgacacgatccgcccccggcagacctccgcaacgaccgtcgaaatcgggacagagatgatgaagacgaaggagatgaacggcgtgggcgtcgacagcataatggggagagctggagctctcgtctctttcgcagcctctcccgtgcgtcgcgaggcccggaccgttctgtttcgcggcgcgagcaacaccgcgacataggatccaggaatggaggacgacaccaccaccttggactcggttctgcgccccagcctttggagaagaggcacgtgcggggccatagccgagaacgacatacacatcgccaccaagagcaccgccatcgctcctccccccgctcgcttcgccagctcccagtgatccccacggggatccgcagacgctgcaatcaggcctctgctccctgcttcgagaaggaccgcaaaccttcccctcagtcgcctctgcttcggaccacgggagaagggggtgctgagggatctccgctggctggacagaaccgttcttcaccgccgcacctgtgcaagagcctagggctgctgtcttcgcatggtgcacgtcgctacttgcctggtcgtgtctaccgcagacgcgcttatcctaccatgccagtaccggaacagtgcccgccatcgccggccacactaaacgagacacctacagaggcctcgacgccggagacaattcagactgcccccagcactgaagctgactctatggacgacgcgcctaatgggtcggggctggaagaggcgccaggccttgtggacgctgctgctgggcttgagccggaagggatacccccttctctttcggcgtccttcatcaacaacttcacccgcccagcagcccaacccctgctccaccaacaccagcaagccccgtcaaacccgaagaagaggggaaggcatggggtcaggccggtccgcaggagcaagcggctcgcggcggttgtttggccacgcggcaacatacaagagcgcgctcgccaagtcctcatgaagcggctggggatcttgcctagcattggccagccaacagctgctgctaatggtgaagctgcactggagcactacatcaacctcttcaagggtccgctgacgaccgtggctcttcaggcactgctacccctctgtggaattattccgcaggggcagacagtgcagggatcttgatcctgccgccgacatctgtttgacctccaacagggtgttactgcctaccaatgtctcaacaaaattgtaaaattcttagttggaacgtgaggggcctta

SEQ ID NO: 2456 - DNA, 4954 bp, Zea mays
gggaggagaagaacaaaccctagagcagacggcgtaaacggacggcggcgcggcgggacggatgaagaccacagccaggggcaggaagcgaatcagggagctgctaatggtcatcagccgcgcgcgttgccaaatcttcaaagggcggacgatgccaataatgcaattgacgtcttcggaagtccaagtatctgaagcccaatgtagacgatgccaaataagcaaaaaatctcaaaatctagttgccgagacgaccgccacccccccccccccccccccgccgccgccgccgccactggcgctactcctatcggcggggggctgaagaatatggcagccgcctccgcctccacgcgacaagcgacggcggaggcgtgcagtagccacgtccaccacgcgcacctcgcggctctcctcaacgcttccgcgcgcttgcctccgctccctctcagccgcctccacctcccgctctcgctccccacggcctcccgcctcgtcgcgtccttccctccactcccgctcctcgtctgcttcctccgcgcgctccgcctcctcccctcctcgccgccgcgcccctttgactcgctcatcaagtcatatgcctcgctccccaaccgcgcctccctcgctgctgcggcgctcgcgttcgccaggtcagccgggtacgtgccctctgtgctcgcctacaacgccgtcctcctcgcgctctctgacgcgtcgctcacctccgctaggcgcttcttcgactccatgcttagcgacggcgtggcgcccaacgtgtacacctacaacatcctcgtccgcgcgctgtgcggccgcggacaccggaaagaagcgctcagcatcttgcgtgacatgcgcggcgcaggctgcggccccaatgtcgtgacttacaacacgctcgtcgcggcgttcttcagagccggggaggtggatggcgcggagaggctggtcggcatgatgcgtgagggcggcttgaagcccaacctggtgaccttcaattcaatggtgaatgggatgtgcaaggctgggaagatggaggacgcacgcaaggtgttcgatgaaatggtgagggagggtttggcgccggatggggtcagttacaacaccttagtgggtgggtattgcaaggcagggtgctcgcacgaggcattgtctgtgtttgcagagatgacgcagaaagggatcatgccagacgtcgtgacatttacgtcattgatccatgtaatgtgcaaggctgggaacttggagcgggcagtgacattggtgaggcagatgagggagaggggcctccagatgaatgaggtcacttttacagccttgatagatgggttctgcaagaagggattcttggatgatgcattgcttgcagtaagggggatgaagcaatgcagaataaagccttcagtggtgtgttataatgcacttattaatggttattgtatggtaggaagaatggatgaagcaagagagttactccatgaaatggaagctaaaggactgaagcctgacgttgtgacatacagtacgattatcagtgcgtactgtaagaattgtgatacacattctgcatttgaattgaaccaacagatgcttgagaagggtgttcttccagatgcaatcacctactcatcactcataagggttctttgtggggagaaacgactcagtgacgctcatgtgctcttcaaaaatatgattaagcttggcctacaacctgatgaatttacatacacatctcttattgatggccactgcaaggagggtaatgtggagagtgctctttctctgcacgataaaatggtaaaggcaggagttcttcctgatgttgtgacttacagtgtgcttattaatgggcttagtaaatcagcacgtgctatggaagcacaacagttgctcttcaaattataccatgaagatccaattccagcaaatactaaatatgatgccctgatgcattgttgtagaaaagctgagcttaagagtgtgttagctctcttgaagggattttgcatgaaaggtttaatgaatgaagctgataaagtttatcaatcaatgttagacagaaactggaatcttgacgggtctgtctacagtgtgcttattcatgggcattgtagggcaggaaatgttatgaaggctctcagcttccataagcaaatgctgcagggtggttttgctccaaattcaacaagcacgatttccttgattaggggtctatttgaaaatgggatggttgtggaagcagatcaggtgattcagcagttgttgaactattgttcccttgctgatgcagaagcatcaaaggctcttattgacctcaacttaaatgaaggtaatgtggacgcagtcttagacgttctgcatggcatggcaaaggatggactgcttccaagtccaagatgagggtgattttcaacattcaagaaccaccctctctgtggaatactggagacctgatggtcatgtttggtacatattgtctcatgagtcataacacgagcatccgaatcagtgttatgtggtaagaacggtctgccctaaatcatgatgtgctccatatggaaaaggctgaaagaagttgcctcatgctgcattattgtgtaaactgagcaaccatttctatctcattaaccgctctgctcttaacaagtgaaatgaattttagttcttgataaatacttgattttgaagggcaggctggtttagtgatgagagttgtttcactaagtcaccggatcataggttcgaagcaacctctctgcatttgcagaggaaggctggtattgatttatcctttttctagaccccactcacgtgggagtctctggcactaggtctgcccccttttataaatacttgattttgtattagcagctttttgtattgttgtttataataattattaggttagaaaaggttgtactgatattttatgatgtattacttattgtcttacttttagacactataataaaagatcttgatatatgtagttagtgaactcactaaggtggtctgatctttattcaacacacatttatcccttctgttacccgtctttttttaatacaagttttaaaaatcagtgctgtgtttgttatatttctaaaaaggatttacaattgcgcgatgagggtctacctaataatgtgaaactccatttcatagtcaacaataaatataatacatttgaaaagtaaaggctgacgaagcattgtcaaaggaaatgctgtaagtaactaattatttcatgaccagacgctggatatcttttttatgcctattgggttgacaactagtggcattcgcattcctgtggactacccgttgatttgtttgagcttttggtcatttttagactattagattttggactttccaaaagccaaactgctcccataagccaaatgccccaaagctcactgtactgagcttcttgtttttggcttccaggagctttttagcgtttaaaagcgttttgaaaggtctagaaacagaggtctaaaagcttccgggaagcccaaacaaacatgcctaacaggttcatcttacttcacagcaatacttgatttcatgatagggcagaagacactgcttcgtgccttctaactaattatatatattgttataaccaccttaaatctaatccatttgttttctaacggggcagtctactctctagtcttgtgcttccactatccttttttttccttagggactaaaacaaaatagcatgtttaacgtattctggtatcattctctgtatcatagatttatctagttaaagttgacaacacagggaaaaaatgattttctggcaatcgactcttctaattatgcgtttccccgtttttgggtaaatcgccttgttttgatacaagaacatccaagtgtttgctcttctgcaggatgaagaattgcacgtctaaagggacagagatagttcagtgcatggaaaaccaatgcatatggtatctacctgtatacctgatgattcaactttgagaattgggagtgaaaaaaaatataccgtgaaactggatgtcatattcgtttcttgcttctcacttgaagacagaaaaaggaaaatgaaaaatgaaagcgtgaaatccacggaaaatgaggagcttgaagaaagtggaacatcaatggcaatggatgtatacaggtggtttgcacttacagatttcagctatctagcttgccgcctagtcctccatcttctctaccttcctcaagacctccgcttccctgtcggctattgccttggcctcctcgtcggtgaacggcggtggcagtgtgcataggtcgaagcctgcaacgtgactctccatggaatccatcatgcagtcccggtgcaggctctgggcagggcaggccacggactccgtgcatatctccacggccttctccggcacggcgggcttgtaccggagcagtccggcgtactcggtgagcaggtgcatcatgtagtcgtagacgtagtccatgctcagctcctccctcacaaaccggctgccctgctcgccgatgagttgcgcctgcactgggtgctcgttgccccagccaacggcgaagttgatggacttgcacatgtgctcccggttgatgggggccagtagtgattgccggcgacgagccccctggacacaggatgtccttcctggaagagcgtcgtcacgaacagcaccggcgagtcgcacgccaggatgtacttctcgctcaccgaccacgcgttcccctccacgtaaaccttgtacctgcagccattggcatatgatctgagcgacaccatagcatggatttggacctgtgaatttcactaggattttttcaggaagtcgtacctgtaagtgcattaatttctaaacaaatattggagatgtttgaaagatctcaaataaattccaaaaaaaaaagatgtcaaatttaaaagttatcaactatagag

SEQ ID NO: 2457 - DNA, 3624 bp, Zea mays
atggatcccgtcgtattgaatcgtgaaagagctgcagcggaccgcccaaaaaggatgcctatgttgttcgatgactatcgtgatgaagatttttatgggctaccgcggaagtacaatattgtcgctcgggtagaagttaaatttcctattgaaccacgttatcgagacagccaacatttcattttgtctgacatcaacggatccaagatcgaggccatgacaagttcatatgagacggtcaaacacttcgatagtttgatcaacgaaaaacatgtttacaagatgcacaatgtagagttcagcattaatttaggtgattgttttcgacatataagtggtcctatggaattgtatctcaccagacaaactgttgtggagccgtacactgttccatttcaaatgccgccattcccaaaacatatattcttgaaccttgctgctattgccgaactgccaaaccggacattagttgacattatggctattgtagtccacttagataaagttcaacacacaatgtggggtaatgtcaggaagattgttgtcatggatgctaggtggtctttacacactattaaagtttggggtgacttactaaacaaaaatgcactctgctgggcgttggctaatgagaattatggcataataattgggactatgtttcggcgatttagaaggcaagagtacctcgagtcatctgattatacagcaatacacttcaatccgtaccatcacagcacccatcattttgaacctattcggaaagctttgatggagcggggtcacgatcgtcaatttgctattacattccttgaagaaaagagatgggacataacgctggtcacaaaccattcacagacatctcaaacaccatcattcgaggaacgtaagaggaagagggataaggaaagatatgatgcgatgtctgttgaacaaaagaatgagaaaaataagaaccgtcgagaagcacgtcagcgaaataaagcactatcgataaagcccaattcatccagagatatatatgaagaagacattaatacaaatcagacacgtgaggcggttaacgttgaaatatttgcagatgtgcatcttggttcacttagctttccagataactgtagcaccattgatttcacacattccgcaacaaaccctactaaaaacatttcactggttggtaattctatcaaacaaaaaattcaaagggctagagaaaggcgtgcaacattgtccgttgaacaaaggaacatgatcaataagaagcgtcgggaagcgcgtcaacgaaagaagggacaaaatgtccaggcaaatgacattgtcccaacgatagaccttctgacaccaggtagtgtgcatgaaactgttagtggcagtggggaaacacatctaggcgtggtggagtctatgcatgaacaccataggttatgtaatcaaacaccaaggcgaaaagaggggaagttagagtacataaggaaacgtagagcactacaagctgacactttgaatccggtgtctctcgccatagaggacccaacatatacctctgtggttgtacacccaacagcttatgcaacagaacatgatactatcggtgacgctggggaaggggacgattggacacaaccccatacaactgcagagatcaccaacattggtgatgatgatgatgagggtatcatattcgaagaggatgatgatgagaacgagggatacttattcactggccaatgtaactatgatgagggtactgacgaggacatcaatatccatggtactcaagatgaatctactgccactgatgtgcctgatccgtacgataatgtgtacaataacatccctgaagaaacacatatgctgaagcctgttcccgactgtggttattgcactgcgaagaaatttgagtatgagccacctggtttttgttgtcgtggtgggaaggttgagctagcaccactggagacccctccgcagctcaaaaggttatgggatagtacagactctgatgctaggcactttcgtgataacattaggttttttaatggccatttctctttcacttccttgtattgttgcctcgatagtatgactactaatgtgagggattctggtatatacacgttccgggctcaaggcatgatgtaccacaatatcaagtcatttggtagggaaggtggggcggagcataaacacctagagctttacttttacgatgatgatcccagtcttgagcatcggtaccgtaagtgtcgtgcagatcagcttcagagagacaaagaggttattagacagatagttggcatacttcgtggaaacccgtactccgagcacctaaggagcatgggccatgttgagaatcttgacgactattatattgcattgaaccttgaccagacgttgaaccaaaagacgtataatgcgcctctcacttcagaggtggccgctgtctggatcgaggggagcgaacgacgaggccagttcagtaagagtgttatgttacatgggaaggataggtcaaaccatgagatccgctcataccatggatgctatgatgcactatcatatccattgttcttccctaaaggtgagcttggatggcatgcaaatattccaaaggttggtgtatctatggacgaagtggatgcataccgtgcgatacatagggcaagtaatgcaaatgatgaagatgcagaatctcctatccatctatgtgtgtccgtacgtgactactactgctacaaattccagatccgtccaggtttattcaatccaatacttcatggtaagcggctgttccagcagttcgcggtcgacacgtacattaagattgagagctcccatttagatttcatacgtaacaaccaggaacggttaagggcagacctataccaaggcttagtgtatagcatggtagatggagatattagagcagagaaggttgggaaacgaactgtgttgtctccgtcgttcattagtggtcctcgtgacatgagacgtcggtacatggatgctatggctttggtgcgaaagtttggtaaaccagacatctttcttaccatgacatgtaaccccaactgggatgagataaggagggagctcctccctgatcagacaccacaggatcgtccagatcttgtagtgcgtgtctttcatgcgaaactacaggagttaaagcataggctgactaaacaggatattctcggtaaggttcgtgcctacgtctatgtcgtggagtttcagaagcgaggtttgccacatgcccattttctactcatcatgcagaggaagtacaagctaacgtgccctgagcagtacgaccttttgatctcagctgagatcccatccaacaagtatcctgaactgcgaaagatggttatcaagcatatgatgcatggtccgtgcggttcgctaaaccctaactgcccatgcactaagggtcgtgcatcatgcaagaatcaatacccccggccttacagtgaagcaaccttgcaagggaaggattcataccctatttatagacgccgtgacaatgggcgtaaggaaaaggttcgagggtgtgaattggacaatagatgggttgtcccttacaacccttacctccttcgcctcttcaactgtcacatcaat

SEQ ID NO: 2458 - DNA, 2091 bp, Zea mays
agcccctctcggccggctatcggcaaattcgacatccgctccgccgtctacagtctacataaggaatcgaggtagccccagtcgtcttcggcgctcaagtttcggccgccggccgcggtgccctccgccccttcccaatcctgcccccaagccccagtcagccatcgaaactccaacccccaggcggccaggcccaagcgtccggcggttgcggccccgcggcttggcgaaggcgaccggtggctaggccccagcgactcagggcggatcaagtaagatttgtagtttcaattaattaggcctgcagatgcacccccgatgcccggttttggatttcccactgccgatgcccgagatgaaggccgccactgcgctggggagctggctgctcccggctgcgcctgccattcgccccacactggtgaatctcagatcccgggggttctgcagtcatggttatttcccctcggcgtcccggatttcttgctcatcagagttatctgatagcgatagaggtctcgccaaggagatggagtcagaattcagtgacgagatatgtgccgagaatggtgctgaagaggacgatgaaacagaggatttaatttggagcaaagaagagatcgatgctatttcggcgctcttcgaccggccgatgcgccagaagcccctgaagccgcgaaaccccgcgaggcagagggcgcttccattgccactgccgcacaagacgaggctgcccgtggctcctgcgccgaagcagcacgtccgcctcgctgcaagagcggggctctcttctcgtgcttgcttcagcgaccaggtgcgcaagaaaccggagttccttctcgggattgcccgggagatcgcagcgcttcctcccgagcacgacgtctccacggtgctcgaccgttgggcgaggttcctccggaaaggctccctgtcacttaccattcgtgagctcgggcacatggggctccccgagcgcgcgctccagacactgtgctgggcccagaggcagaaagctgtgccgttgttccctgacgatcgtgttcttgcttcggccatcgaggttttggcacgctttgaacggctcagagtggagtctgcgctggagcaatgtgtgcccacggccagccgtgccgttctcgaggccatggcgagcgggttcatcagggcggggaaagtagaccgcgtgcgcaagctcctggaacttgcaaggatcaataacaggacgctgcaccccagcatctacgtgaagttgatgttggaagccacccggacacctgaaggctacgggcttgcgtcggcactggttgatgagcttggcgagaggccggagttggagttgcgtccacaggactgcacggctgtcatgaaggtctgcataaggctccgacggtacgcagccgtggagagccttttcagctggttcaggggggccattgggagccccaccgtggtgatgtacacgacggtgatccacagccggtgccgtgacgggaggcaccgagaggcactgtccctggtgtgggaaatggagcaggcaggctgcctgcttgatctgccggcctaccgagttatcgtcaagctatgcgtggcattgcacgatccggggagggctctccgctatctgtcaaggatgaaggaggctggttttattccaactggcgacatgtacgacagtctgatcgagggctatttggcagatgggaggctggccaagtgccgacagctgatcagagatgccgagtcagccggtgtgaagctggataggaggctgctttcgcggttgtctgaaactggaggcagacatccttagttgactctggtgagtgttgttgacatgtgttatgcacgggtagaatccggacaggacaggaacaccacagaggaaaattatctctagcatttattgtagagtaatacaaagagtaatcttggcagaagattagtacgttgttgcccagtttccctttgtatttgtcagtaatccatgatttcatgacaacgatgaattgctggctgaaatcggctccacctttaagccaaaatcctgaaactgctaacgcatgcttgcaagttcctttgtatcctttc

SEQ ID NO: 2459 - DNA, 2469 bp, Zea mays
aattaataaaataatgttgagtatctccttcgcccctccccacctggctcctgctctacacaagcagtcaagggccataaagcgcagcaggatctccctctgcccaaaaccaaacctgcctccgcacctaccatttcctcccccaaaccaccatggacttctccgccggagggagtgggagcggcggaggaggcggaggcgccggcgacggccgggcgcaggcggagcgctggctggagatcgccgagaagctcctcgcggcgagcgacctcgtcggctgcaagcgcttcgcggagcgggcgttggaggcggacccgctcctccctggcgccgacgagatcctcgccgtcgccgacgtcctcctcgcctcccagtccatgggcccctcgggccaccaggacccgctcgccatcctccagctgccgcctggggtcaaccccgaccaggcctccgtctcccgcgcattccgccgcctcgcgctactcctcgggccccgcaacccgcaccatggcgccgagatggcgctccgcctcgtcaacgacgcctacgccttcctctccgatccgtctcgccgcccccctccgcccgccaatcccgccactggtaccccttcctcctcccactatgcggccgctcccgcccccgatccccgggagttctggacggcgtgccccttctgctgctacgtgcaccagtacccgcgtgacctggtcgggcgcgccctcaagtgccccaacgagggctgccgccgcggattcgtggcttctgagatcccgaccccacccaccgttgtgccaggcactgatatgtaccactgcgcctgggggttcttccccctcggatttcccaacgcggccgacctgggcgccaactggaagccattctacaaggcgttcccttggaacacggctcccagtggtcaaggtgctgatggtaggagccatggcaaccgtggtggcaggcaggcacagaatgacagtgctcgtggtggctcctctagaggtaggatcaagaagactaccgcccgcaagaaggtcggggcagggttgaggaggcgttctcttggtggtggtgtggagagtggcattgattcttcgatgctcgggcaggaaggctgggctggggatgaggacggtggagatggaaggaccgaggaggtgaggggaattaacataaatgaggcggcgcaagctacagacggcactggtagggttaatgttagcggtgctggtggagttgaagatatgggcaacttccatatcgatgttgatgcaaccgaggatatattggggaatttgcacaacctgcccttcctgagggtggacaatcttgggcggatgatttaactgttcttatggtttgctgtggctagaaaagtattgtatgattagccaggccgaaacagatgtctcagggactggcccttgctgttcaactgttcgttttattttaactgttccatctcctgttatgccatgttgtagttgtagacttgttgtctaccttgtacctgtagttacttagcatcagacatgggaaatttgtatctccattagatggagatcatgccctttgccttagcaaacaaacttgcggagttttatggtgatggaaataatgcttcaaagaggtgtggctggtgcttaccatgccacttttggtttcttcctggcatggtgacacaaatgttgctgagatcaagtagatgactgttttggccacccgcagtgggttgtccataccatgtcctgaaggaagcaaagtgcggttggcccagcttagggcttgttcggttattcccaaaacacatggattggatgggattggaaaaaaatgagaagatgtttgacttatttgggattcaaactcatccaatcccactcaatccacatggattgagagctaaccgaacaagcccttagtggggatatcagcagccctcccctgaagggcgaattccttttgctgttttaacccatgtttgttaggccttttattccagaaacctatgcaaaactctgctataagtttgccaagaaatgctaactgcagttgttatgttttcagcaatttcagggtaagaagatgttaacaagcaaagcaacctctctgcatttgcagggaattgcaggggaagccttctctcagtttatccctttcttagggcctctttgcatttgcagggagggcttatctcggtttatttcttcttcatactctacctgagtgggaacttttgatgctgagtttgtcttatgcctatttattttaagtcgaatgaaatatgaaggccaaatcttgactgattactagtgactatttagctcgcttactttctgaatggggccattgcattttttgatagtatgggtccgtttgaatccttggagctaacaattagttgctggctgttaaaaattagctaagatcctatttgaataccagttaatattctggctagtgtcttac

SEQ ID NO: 2460 - DNA, 1208 bp, Zea mays
agagaggtgaacgggcaatctcactcactctccttcgtagttgaaattgaactcgctggccgcctgtgtatagtccagtacttccagctagaatctgaaagaaactcgtcaccagctcgatctcgtccttcctcccttcgctcgactcctctgcttctcccccatccggtacgtgcggtgcggggaggctagccgggcggccggagctccaaccgcaatcggtctcttgctctgctgctgcgatggaggcgtcgtcgttggcgctcgtggccgccgtgctcctcctgtcctccacgcttgccgcgtcagatttctgcgtgtgcagttcggaccagccgacggcggtgctgcagaaggcgatcgacttcgcgtgcggtccgcaggggggcgccgactgcacggccatcctgcagggcggcgggtgctacagccccaacaccgtcgccgcgcactgctcctgggccgccaacagctactaccagaacaacaaggccaggggcgccacctgcgatttcggcggcgccgccgccgtctccaccacagaccccagtttctccgggtgcactttcgcttccagtgccaccagcgctggcgctgggaccgggacggcgggtaccaccaccggcaccacgaccgcgggcggtgcgacgacgggcaccctgagccctggcgtgggcatcggcggcctcaacggcacggggatgggcggcagcaccggcctgggaccggcggacaacaccctggacgccgccgcgcccggcctgctccccggcgccgcatccctcgccgccgccgccgccgccctctccttgctcgccctgctgcagcattgattacgtgggctagctgcttgctctgtggtccgtgaaaaagaaagggggcacgggggattgtactggagaatgtgaattggttcggttggttggaggacggatccgatttcacttcacccatctttgttagtagtggcaggcggtggttgggggcggtgtattctttctttcttttccttatgcctttttgatgtatggtttatttagcggtaggatgccagtctctttcctacaaggaccattgtctctcctctctctctctttctttttaaattttgtttatttataaaagttgtacttgctatcctcttttcttaacctctctgtttttattagaccagtttcaataaaaattcttaagaagtattgttttta

SEQ ID NO: 2461 - DNA, 1341 bp, Zea mays
attgcagtattattagtgtccggcacttgaagcgacaaccactacgaccagatcaaagtcctgaggatttgcaacgttggaagccggctcccggacgcgcaactgcgcggacttttcctgcaagcttcttctgcaaccgaagcaactcttcaatccagaagtggctgctccagggcggcatggcgccaaaagtctccagcccgttcctcctcggcctaccctgggtcgtcgcgcacgttggatccatcaaatcttccaatgcacgctgcgccggcccgggtcgtcacgcaagagagctcccttcttgctagcgagtagcgactagcgagaggtcgccggcgcggcaaaaatccgaaaggcgagccgagatggcggggtcgcagtcgcaggcgatgctggagaagatggagctgcggcagagctaccgcaacgtctggcacaccgacctcaccaacgccgtcgccgcggacctcccgtggtgctgcctgtctctgtggtgcggcccgtgcgtgtcctacatgctgcgcagacgcgcgctctacaatgacatgtcaaggtacgtgtgctgcgccgggtacatgccgtgcagcggcaagtgcggcgagagccagtgcccggaagtatgccttgcaaccgaggtgttctgctgcttcggcaactcggtagcttcaacccggttcctgctgcaggacgagttcaacatccagacaacgcagtgcgacaactgcatcatcgccttcatgttcttcctgcagcagctggcctgcatctgctccctggtcgcctgcatcgtcggcaacagcgagctctcggaggccgcgcacgtcatctcctgcatgtcgaatctggtctactggacggtttgctcgtgcatgcagacgcagcacaaggtggagatggacaagagggacggcacgttgaacaccatgtctgcgcctccgatgcagcagatgtcgcgttggtaggtgcgagtgagattatgtgccgacctcgatacggaggagggtagctgctggagctggaggctatcagcaatctcctactctggttaggacggtccatttttcagatttgggtgagataccatggctagtgtgtaaaccatgtcccgtttgtttgggcaaattttcgtgtttaatgagttgtgcatttttcacaacttctgttatacctcttacggctagatgccgaaattagatatcctaataatttattttaattgactacaatagtatgtgcacttgtattttatttagaaatgagacgagagcaacgagtgtagaggctcaacttatcctccgggtgctttgtgcctattgagtatcaaatttggcactttcc

SEQ ID NO: 2462 - DNA, 1936 bp, Zea mays
cagagtccaaccacgcctcgaaatataaccccccgccacaccgtacgagacgagggcagatatggaagctgatgctgctgctgccagtggcggcctggccctgctgcccgccgtgctgctcctcgtggcgctctccaccctcgtcttctccacatggagcaaccgcaacagcaggctgcccccgagcccgatggccctcccgctgatcggacacctgcacctcatccgcccgccgccgcacagggccttcgaccgcatcctggcacgctacgggccgctcgtctacctccgcctcgggccctccacgcactgcgtcgtcgcgggcaccgcggacgccgcgcgggacctcctcaagcacgaggccagcatcccggagcggccgctcacggccgtcacgcgccacctcgcctacgacgacgccggcttcgccttcgcgccctacggcccgcactggcgcttcatgaagcgcctctgcatgtcggagctgctgggcccgcggaccgtggaccagctgcgccccgtgcgggaggccgagctggcggccgtgctggaggcggcgcgccaggcggccgccgctcgggagcccatcgacgtcagccgccacctcatcagcatgtccaacaacgccatcatgcgcatggtggccagcgcgctgccgggccacatgacggaggcggccagggactgcgccaagcacgtcgccgagctcgtgggggccttcaacgtcgaggactacgtcggcctctgccgcggctgggacctgcaggggctcacgcggaggacgcgcgaggtgcgtgacaagttcgacgcgctgctggagatcatgatcacgggcaaggaggagagtcgccgtcgtcgccacgccaccaccgacaccggcggcggcaccaaggacctgctggacatcctcatggacgcggcggaggacgccaacgccgaggtcaggctcaccagggagaacatcaaggcgttcgtcctcgacatcttcacggccggctccgacaccaccgccaccagcgtggagtggatgctggcgctgctcatcaaccacccggcctgcatggacaagctgcgcgcggagctggacgccgtggtgggcgcgtcgcgcctggtcggggagcaggacgtcccgcgccttccctacctgcaggccgtcttcaaggagacgctgcggctgcagccccccgcggtgttcgctcagcgggagaccatcgagccggtccacgtccgcggctacgtcatcccgcccaagacctccgtcttcttcaacatcttctccatcggccgcgacccgggctgctgggaggacccgctccagttccggcccgagcgcttcatgcccggcggcgccggcgccggcgtggaccccaaggggcagcacatgcagctcatgccgtttggaagcggccgccgcgcctgccccggcatgggcctagccatgcaggccgtgccggccttcctcgccgcgctggtgcagtgcttccactgggaggtgcccatcccgccgggccaatccactgcgccgcccttggacatggaggaggcagcggggctcgtcaccgcccggaagaaccatctcctcctcatccccacaccgcgcctcaatccgctaccggcaagagcggctacgtagttagtacctgcgaatccagtctcagttcatcggtccatccaaattcagacgtgtcctccattattgcaagccgcgcactaagatcatatttctgtttgtttatatttctcggtcacacatacgtttgcaatcaccttcaggaaaagtgacctttgtacccgttcgatgttggtacatccagatccgtgtgctcaggaattacgtattactactatatatatactggtccgtttgagtcctatcacatcggatgattaaggacatgtttgaaaccacctagtgtttaacaaactgattataaaa

SEQ ID NO: 2463 - DNA, 1796 bp, Zea mays
atcagatgggacataatgtcggtcgcaaaccattcacagacatctctaacaatatcattagaggtgatcaaaatgaattgctcggaccaatggtcgatgctaaggagcgtaagaggaaaagggatagggaaagatatgcagcgatgtccattgaacaaaaaaacgagaagaataggaagcgtcgtgaagcacgtcaacgaaacaaggaacacaatgtgatgcccaatgtgtcaggaggtgaccaaaatgaacagcttaggttgtataatcagacaccaaggcggaaagagggaaagttagagtacataagaaaacgtagagcactgcaagctagcactttgaatcaggggtccattgccatggaggtcccaacatatacctctgaggttgtacaccctacagcatatgtatcggaacctgattcatcctctgataactcatgcgactgggttatccctgaatacaccagtacacctttcatgccagcttcaacacaaactgaggatgtcggttcacccgatatgtctactgagccactaagacgtaaacatcatgttctgcgtggtgaaagacaagctatcttagcccgtcaaaacaagaaatttgaagcaaacattgcacgtaacgtggctactttgactgaagatactatcagtgacgtcggacaaatggatgattcgacacaacccggttcaactatagagatcaacaacactgttgatgacgatgatgagggtgtcatattcggagaggataatgatgagaacgagggatatatattcgctgatgaggacactaacgaggacttcgagatagatggtactcaagatcaatctgttgtcactgatgtgcctgacccgtacgacaaggtctacagtaacatccctgaagaaacacatatgttgaagcacgttcccgactgtggttattgcactgcgaagaagtttgagtatgagccgcctgggttttgctgtcgaggtgggaaggttgagctagccccactagagacccctccccagctcaggaggttgtgggatagtgcagactctgatgctaggcactttcgtgataacatcagtatgacaactaatatgagggattctggtatatacacattccgtgcacaaggcatgatgtaccataatatcaagtcattcggtagtgaatgtggggcagagcataaacacctagagctttacttttacgatgatgatcccagtctcgagcatcgattccgtaagtgtcgtgaagatcagattcagaaagaccaagaggttattaaacagatagttggcatacttcgtggaaatccgtactctgagcaccttaggagcatgggtcatgttgagaaccttgctgactatcacatcgcattgaaccttgaccaaacgttgaaccagaagacttataacacacctctcacttcggaggtggccgctgtctggatcgaggggagcgaacggcgaggccagttcagcaagagtgttatgctacatgggaaggataggtcaagccatggcatccgctcataccatggatgctacgatgcgctatcatatccactgttcttccctagaggtgaacttggatggcatgcaaatatcccaaaggttggtgtatccatggacgaagtggatgcataccgggcgacgcatagggcaaataatgcaaatgatgaagatgcggaacctcctacccatctatgtgtgtccgtgcgtgattactactgctacaaattccagatacgtccaggggtattcaatccaatacttcatggtaaacggcatttccagtag

SEQ ID NO: 2464 - DNA, 1752 bp, Zea mays
aatgtaggagtggagagcatgtgctaccttattagtagaatgagttactttaggttttttataacgagaggctagataatttaactataaatataaggtattactctaggttattttcataacataagaggtcgataatgtttgaaaaatgaaagggatataatgtctattatttttctctaataattcgatgctattggtttaatggatgcatatcggattcttgcgatattttctaagatttgtttagtatcatgcgaggatggacttgtagaggattcgaaagtagttttaaattagttatagtaaagtatatatggatattgtgttataaaataaaaagaacaatgatagatgatctaatttagaggatttcttctaaaatagaagcttcctaatgttgatctactagttaagctcaaacttgtgtcatccctcaatattttgagcaattgcaatgggaatttaaggaaaagtaactcttgttgacatgtttatatcactagatgaccggaacatgttgtacaatggtcgaatatgttaacaagtttgtacaaatgaacttatcattgcacaaaaacaccgatgaaccccgatatgaaattaatcacaaagaaaagaacttatcattgcaaacataacatctcagtatcttattcctttatgaagatgatgaataagtaattgtaaccttacaataacgaagatggcgaagttcaaataaaattacaaacataagatctggttgatcatatgtactagcattcatctacatcagaaaatgtccacaagctcataacttcattaccaatgaccaccaccaatgccaccgccaccaccgaacccgccgccgccgccgaagccagcaccacctcctgcaccaccaccaaaccctcctcctacaccacctccactgcccaagccagcaccaccaccgccgccaaacccaccaccgctacctccaccaagacctccgccgaaacctttgcctcctccgaagccaccacctattccagaaccgctgccacctccaagaccaccacccaaaccaccgccgccaccggcacctccgccaagaccacctccaactccaccacctgtaccgccaccgaggccacctccggcaccaccaccacctccaaaccctcctcctgcgccaccaagaccttcaccagcaccaccgccgagaccaccgccaagcccacctccagcgccactgcctagtccaccacctgctcctccacctaggccgcctccatcaccaaaacctccgccacctccaaggccaccgccattcccaaggccaccaccgagcccacctcctgctccaccacccgcgccaaacccgccccctccaccaagaccactgcccgcaccgagacctccaccttttccacctccaaacccgccaccaagacctccaccatgcccgagcccaccaagcccagcaccaccaccgaagccagcgcctccgccgaaaccgccaccgccacccaagttctgcgtctcaaggaaccgcgcctcaacggacactccgagagccagcaccaaggccaatgccgcgagctccaaggccctcccacccctcgccgccctccccatggccatgagacagtggagtaaattgagctgtgttgctgcggctgtgatgcttgcggcgaagaagaacgctgcatgcttatatagcggagccaggctagcccggccgatggatcaattggaacgagtgggcagtgtggaaaagccagcagg

SEQ ID NO: 2465 - DNA, 1268 bp, Zea mays
ctctttatttctccctcgcttccggcctcccctattcctccggtcgacgtgagagagcggaaggttggtctgtaggcagggttagatcctcgcgacgctcgatcctgacggtggtgggcgaagatgttggacatgcagaagcggcgcgtgcggctgctgctcttcatcacgggcattctggcgctcagcatgaccgctgagaagtccagagaacttgttggaaaggaggctgcatcaaagagtggtcaatccacattcatgaactgctttgacaagggctctggcagccttgcatgcacatcaaaggagggtgtcaagttgtacgtcaacaacattcgaagtgcacacttggaaatggtgcgacagcgagccatggggaaagctttagctgatgctgtggcagaaggcctaacacctagcgaagcagccaaacaagctcagaaggttagtgcaaaagcgacaaaaattgccgctcgtcaagcaaataggatattggggccaataatttcttgtggttgggacttcttcgaagcaatgtactctggcggaagcatgatggaaggttttcttcggggcactggcaccttgtttggaacttatgtgggtggtttccatggtgaggagcggtttgggaagctggggtatcttgcaggaagccatgtcggaagctggggtggaggaagaattggattgatgatttatgatgtcataagcggactgaaatatatgttcatgtctgtccaacctaagtatgaatcatcgtcatatgcatcagaagatggtccagaatacgcaaaaagatatacaaatcaagaggagccaacatactatgaaccatcaaaggaaaagcaagaagaatcaaaatggtttggtttgttctaaatctatgaaccgaagtgttccgtcttaaactcaagggcggagctaggtagtagctagattgttgcacccccccccccccctaaaaatgtgaaaatggtgtctttcaccaaaagtccaccatatatgcacccatgaggcaattgtactcatcactgcttcgctactggagcatgaaacaattagcttgttttgttgtacatttctgaatgttcagcttcattttgtatggttacctagattaggtgtgattcttcattgtaattcttgttttggctaccatgtatataaaacatatgtatcgactcttgaggttggcagaatgcaccacaaacaacaacaatagtgaaccacttatataaagttgtgagtgtattcttgttaaaaaa

SEQ ID NO: 2466 - DNA, 1934 bp, Zea mays
caggacctgctgaccctgatcattggcaaaccaagcccaggcagcatgatcggtttcgttatgttatctactactggtcctagcagccccgacaggcccacacacacgcacagcacagagacgttggttcagccatgcctatcgccctcccactaaatctcatcgcgttcgcgacacctttctgcgaaaagatacggacatcatcaccgagcaccaagccaccatgttcgatgtttcccgtctatccaagaaactgcagaagcgcaattagcctagagattgcaggagaacagaattcaatcaggccgtcttccatctccaccttcctcgcctctctctctctctctctctaaccactgtactagaactatcattacctgagcaagattgcttctacctgtactgtgctgacattatacacctcttcccttcttgcccgtgccaatcgccattgccaggcaccacgtagagctgcattgcttcgaggccatggccatgggagttgcaacaagaatttgcttcgtagttcctgttctgatctgcacatcttccagaggagggagggccgcgacattcacgttcgtgaacaggtgcgcggcgacggtgtggccgggcatccagtcgaacgcggggagctcgaggctggacccgacgggcttcgcgctgcccgcgggcgcgtcgcgcgcggtgccggcgccgtcggggtggtccggccgggtctgggcgcgcacgggctgcgcgcaggacgccgctagcgggaaggtggcgtgcgccacgggcgactgcggctcggggtccctggagtgcgacgggcggaacgcggcgacgccggcgacgctggccgagttcacgctggaccccgccggcggcaacgacttctacgacgtcagcctcgtggacggctacaacctgccggtcgtggtggagcccgcagggggcggcggcggcggcgccacgacgacgtgcgccgcggccgggtgcgcggcggacctgagcgagcggtgccccgcggagctgcgcgccgagggcggcgccggctgccgcagcgcgtgcgacgccttcggcaggcccgagtactgctgcagcggcgcctacgccagccccagcacctgccgccccaccgcctactcgcagctgttcaagtccgcgtgcctcaggtcgtacagctacgcctacgacgaccccaccagcaccttcacctgcgccggcggccgcgactacaccatcaccttctgtcccgtcgcgccaccaagcctgaaatcgtcgagcggccctggagcaacggcggcggcaccggcaggcccgacgccgcagatgccgcggctggcaggtgggcaaggcggcggcccggacgggcagggcgtgatgctgggcgacagctcctggctcgccagcctcgccacgggcgccgcgccgccggggccggcgctccgggcctcgcccctcgtgccgctcctgctcggagtcggcggcctgctgctggtgctgtagtgccagcggcagcaacccacccccgtcacggacacgcacgcacatgcgcgtgaggcgaaagctctggtcaaagaacagcgcagcgcgggggcactggcgcacagcgaagccgtgcgctcgggttgccgccggccgtgccgacgcggacgccgatctgcccccatggaatggaagggtggtgccgtggtggctggtgtcgcgcgcgctggatgggggctgcccgtgctgggtttgtgcggggagtcgatatggtgccatttgtaaaatccgccattccttgtttttcttcttcttcttcttctttcttattgggtttgtaccgttgtgtttcacaaaagaaaggaacgtttcgcagattacagaagactagaagcaatgattatgcacgcactcagcagttcaagaccatttgacctgccgaatatatacatgatcaaatcaca

SEQ ID NO: 2467 - DNA, 2247 bp, Zea mays
ttttctctgtttcccaattcccatacgcatggaaacatctcgtcgacccaaacccatccacccacaaggcggaatacacgatccagtccgatcctcgccccgcgcgctgctccaaaccctggcgatgtcgacggcggcggccgcgaagactccgatcaaggccctgggctccgcggccgcgggtgccatgactccgaccaaatctcaggcccccgcggcggccaagacgccctgtacctctcgcgcgcggtcctcccacgcatccgagaattccaaccccaacatcccgggcacgccgcctcccccgcagtcgacgccgtccaagcccagcctcaagtccccggcgggcgcgggagccaggtccgccaccgcgaagaaaaagccctccacgcccgcgcccgccgcgccaccgctggagcgggagcgggagcggcgattcctcgtggcgaagaagggcgcgcggcggaggcgcaacgtcgggaccatgggaggcggcgggggcggccgcgggggagagatcgacttcgacaagtgccgcgaggccgctcgcgaggcgctgcgcgcgtcgcagggggagttcttccgcaaggaggtcgccgcatccacagccaccggagaggatcaattgggacaggaggaggaggggaagccgctggctgacgaggatgtgaaaggtggagcattcgaggagcggcaggaggaggagaccgacgcggagctggaggggagcagcaaggttagggcgatgaggacgaaggcgatggctaaggcgatgagcagcgttccgaatcctggctctggccgcgtcaagcatatggtgcaggccttcgagagcctgctcaacatctccggcgccacctccgatgctgaaagggccggtgagggctcatgggcgctgcccgggttgcagctatggaaggaggatgataagggtgatctggggttcccaccagtgtcggtgttctcttctgctgatttccagaatgcagggtctaatcgactctgctcgtcactagatggaaacaccgtcaggtcgagctgggacagcagaacatcgactggcgagtgcagcaggagaaattcatctgagtcactaaggagcagaacatcggctggcgggcgcagaagcaggagaaactcatctgagtcactaaggagcagctggaacaaaaagctcaaggtcaccagccagcatccattcaagttgaggacagagcaaaggggaaagtttaaggaacagcagttcgtccaaaaggtgcaagagatgcttgcagaggaagagaagaagcgtattcatattgcgcaaggattgccatggactaccgatgaacccgagtgtttgataaagcctgcagtcaaagaaagaactgagccgatagaccttgttttgcatagcgatgtgcgtgctcttgaacgtgcagaatttgatcagcacgttttggataggaacaagtttgctgagcaacaaagattagaatgggaaaggcaacaggaattagacgaagaagaaaggataaggcaactgaggagaaccgagctgattcctaaagctcagcccatgccatactttgaccgcccattcatccccaaaaggtccacaaaacctcctacagttcccatggaaccgaaattctacctcaggccagaaaagttatcctgttactatcgacagcaatgtatggaacttggaaagctgaatccacaacatcagtgccaacatccgctgtggcaatcgagaaatgcagagcatcgacacacatgatccaacaactgtttccatttcctggcatcgtcttattcattcttgattcgtcttcttccatgtgcgaagaaattgctatcaagcgtgtttttgtagctttgcttggatcgccttgcctccaagttctgttaatcgctggctctgtgcttcagatgcaatcccaccgaggtttgaaatttgtcgttcaagaaactgataaggaaattcaaggatgaattttctgtggtatattaatatgtactttaatgttggttcttgcccgctatgcatgagcccggcagtcccagtgtgcttttatatggtagtttctatttgtgcttaagtatataatataagagaaaaatatgttgtatatgagtttagaaccaacaattatggttcgaacctttatgtctgcatggttttggcatttaactatgagttagcacaatggccatagaaaccgtgaaactagagaaactggtgttttaatatagtagatagag

SEQ ID NO: 2468 - DNA, 3031 bp, Zea mays
gaaagaaatacctcttctccactccacctccgcgtccccaccttcagcgtcacgcacctcgacgcgcagcgcatggcgactcggctctcgtccacgggcccctgatctaggcagccggaccccgatcggttgcccgtgcagcgcgacccccacgaccaggatccagggagtcgggccacggtcctcggcaaggcatctcatcggcgaacgttttttcgaggccgggctcctgctcccccggaatctagggttcgcctcgccccgcgtcgccctcgatgggcccggccgcgcagccgccggacgccggcggcggtggggacccggaggcgtggtacggcagcatccagtacctcatcaacatctccgccgtgggggccgcctcctgcgtcctgctgttcctcctcgttaagctccggttcgaccaccgccgcatcccggggccctccgcgctcgccgccaagcttctcgccgtctaccacgccaccgcggcgcagatcgctctccactgcggcgccgacgccgctcagttcctcctcttcgagcgcgcctccttcctcatcctcgccgccgtcgccgctgccgccgtcgccgcggcgctcccgctcaacctcctcgcgggggacgccgccgtcgtcgaccagttcgcttccacgaccatctcgcacatccccaagtcgtccccgctcctctggctccacctcctcctcaccgccgccgtcgttgccatcgcgcacctcggcatctctcgcatggaggacgcgctacgcatcacgcgcttccgcgacggcaacggcaaccccagcgaccccaactccagctccgtcgccgtcttcaccataatgatccagggcatccccaagacgctggccgcggacaagaccccgctcaaggactacttcgaccacaagtaccctggcaaggtttaccgtgtcatcgtgccatttgatctatgcacgctggagcatctcgtcgagcaattggggaaggtccgtaacaagatctcttggctggaggcaaggttgggcgcccgcgacctgtttgatgacattgtgcacgataacgacgacacagtgcagtcagaagagcattggtttgtgcgaaggtgcagagggctgtgggcaatggcaggggagaggctagggttcactgacgaggagagattgaggaagttgcagactaagaaacttgtgctcgcaagcaggctatctgattataaggaagggtgcgcccctggcgctggtgtagcttttgtggtgtttaaagatgtctacaccgcaaacaaggcggtaaaggatttcaagatggagaggaagaagacaccgattggtaggtttttcccagtgatggagctccagctcgagagaagtcgatggaaagtggagagagcaccaccggcatcagatatctactggaatcatctaggtcttagcaagatatcttcacggctgaggaggattgcagtcaacacctgcctaattttgatgctcctgttcttcagttcacccttggcaatcatcagtgggatgcaaaacgcggcacgaatcatcaatgtggaggctatggatcatgccaaatcatggcttgcctggcttgaaggttcaagctggttctggaccataatctttcagtttcttcccaatgtgctcatctttgtgagcatgtatatcatcatcccgtcggtgttgtcgtacttctccaagtttgagtgtcatctgacagtgtcaggggagcagagggctgcattgctgaagatggtttgcttcttccttgtcaatctcatcctattgcgtgctcttgtggaatcatcacttgaaagttggatacttagcatggggcggtgctacttggatggtccagactgcaagcagattgaacgctatttaagcccatcctttttatcaagatcatcgctttcttccctggcattcctgatcacatgtacctttctgggaatatcttttgatctgttggcaccaatcccttggataaagcatataatgaagaaatttaggaagaatgatatggtccagttggtccctgaagagaatgaagactacctacccatgcagaatggtgaagaaactaataatttgacagcacctctaatgcctgagagagaagacggtggccttttggataatatcgaggggcatgatctttccctgtacccactaaacaggagcttccatatgccaaagcagaaatttgacttcgcacagtactatgcttttgacattactatatttgccctcacactgatctactccctgtttgctccgctcgtggttcctgtgggtgcgacatactttggctaccgttatctcgtggacaagtacaacttcttgttcgtttacagagttagagggtttcctgccggcaatgatgggaagctgatggacagagtgttgtgcatcatgcaattctgtgtgatcttcttccttgctgcaatgctgctcttctttgctgttcagggtgactcgatgaagctacaggctatatgtactcttgggatgttagtgttctataagttgcttccctctagaagcgatcgcttccagccatctttgttagaagggatgcagacagtgaatagctttgtagatggtcccacggattatgaagttttttcacaacctgacctggattggagtctgtatcaatcctgaagatcaatacacacttttgttcattacaatgacatctttcacgacttcgaacctggtgtatcaaagtcatttattcttcttgtacagctatgtagattaactcttgtcttcttagatatgtatttgttttgtcagatatgacaggcacatgcagttttggtgatgaacatggcctgtcaaaaaattactttaaatgatacatagtcattttcttgttttttttttttgtttaaggatctaaggtcctataaccagaagatgtcatatttatgcatccttgtgttgtagattccctatcataatggatggtgactagaagagataatttacatgactgatataagaatcaaaatttgttactggaa

SEQ ID NO: 2469 - DNA, 778 bp, Zea mays
cggagcgagggtaggtccgtcattacaggcatccaaaaccctagcccgcaggtcctatataagcagcgagccaggcgaaaccctaccgattgggtccaacaccagccgccgccatgtcgaagcgaggcaggggaggttcggcggggaacaagttccgcatgtcgctgggtctgccagtggccgcgacggtgaactgcgcggacaacaccggcgccaagaacctctacatcatctccgtcaagggcatcaagggccgcctcaatcgcctcccgtccgcctgcgttggcgacatggtcatggccaccgtcaagaaggggaagcccgacctcaggaagaaggtgatgcccgccgtcatcgtccgccagcgcaagccgtggcgccgcaaggacggggtctacatgtacttcgaagaacatgccattgccactcgacaacagttttctgacggttggacgtccatgtccttcggcttaattgtggagcaaacaaaaaatgtttgtatattcccaagcaaacgtcaaatattaagcctctgggtgttgagaggatccaattgaattttctccatctgaaggcggcctcatattccattgcccttggtagcggcgttgctgcattgaaactttgggactggccatgaggcagacagttctaccccatattaatagaacaagctcggtttagtgtatttatattttatcaaagtctttgtttttcgtttatttatgtcagttttacaatcacacttgtctttataattgcttctatttgattttat

SEQ ID NO: 2470 - DNA, 1324 bp, Zea mays
gtctccgcctccaaccatccacatgggcatggcgatggtgttaacggacggcgaggtcggtgctctcatcaaggtctccgcggctgtttgggtggcgatgtcctacgcccgcctcgccgcggcgcgtctccgcccaggcgcgcttcgcctcctggcgctgctgcccgtcgtcgcgctcctctgcgcgatccccttcgccttctcgacgtccacgttccgcggcacctcgggcttcttcctcgcctggctcggctccttcaagctgctcctcctcggcgccggcattgggcccctcgacccttccctccgcctctcccacttcgtctgctcggccaccctacccgtgaagctccggcggcagtccaaagagaagagccaagcccccgcccgtggtccggcgaggatactcctctccggcgccgtcatcccgggcgtcatctacgcgtaccagttcaagagctcgatgggcaggtaccagctcctcgcgctctactccgtgcacatctacttctcgctggatctcctcctggccaccgtccacaccgtgatccacgacctgctcgggatggagatggagccgcaggtggaccgcccctacctggcgtcgtcgctgcgcgacttctggggccggcggtggaacctcatggtgccctccatcctgcggccgtcggtgttccgccccgtccgcgcgcgcctcggcaacgcggccggcgtccatgcgacgttcctcgtgtccggcctcatgcacgagctcatgttctactacatcatgcggagcgcgcccagcggcgaggtgaccgccttcttcctcctgcacggggcgtgcgcggccgcggaggggtggtgggcgtcgcatgccggctggtggcgcccgccgcgcccggccgccgtgccgctcacgctggccttcgtggccgggacggggttctggctcttcttaccggcaatggtaaagggcggccttgacgagatggttctgcgggagtgccagggcatggtggtgctcatggagcaggccgcccggcggctcgccggcgccacagatctcgtctcgtcaaccatgtgaatttgagcaaacagcatgttgcaagctggctgtctctgctgcttgacgttatctgcaccgcaggatttagatctgacggatgtagtggtggggttggtggatactatactgtttctttcgtgatgggctgtgactgtgattgacaactatccgtaattgaatacattgtctttcagatccggatgataggaatgatatgatagttgggatttgggagagatgcaaatgcaatgcaagttgattaaaatattctcgctg

SEQ ID NO: 2471 - DNA, 841 bp, Zea mays
gaatttcaggattgctatcttcttcatgttctgaacgagaggcacgatagcatgataatgatctttgtgcgcacctgtgaatctactaggctccttgcccttatgctgaggaatcttggtttaaaagctatgtctattaggtgggcagatgagtcaggacaagagattaggtgctttgaacaggttcaaagcgaaagattgcaatatccttattggcactgatgtagcaagttgtggccttgacattcaaggagttgatatggtcatcaattatgatattccaatgaattctaaggattatgttcatcgggtgggtaggaccgcacgtgcagggcggtcaggatatgctgtatctttggtgaatcaatatgaagcccagtggtttgtgctgatcgagaagctccttggcaagaaaattgaccatcgtaaggtggacagagatgaagtcatgatacttaaagggcctatatccgatgcaaagagaattgcacttactaagttgaaggagtccggtggtcacaagaagcggggaaaagtgggagatgatgacgaagaggtggaaaatcattctcattctaaaagaccgaaatccttcaagaaatcaaacagacgatgaaggctctggagcccgccagatgagatagaatccgagtgtacagctgcttcattttactctggtcatctgttgttcagcgcagaccctatggatttgcagtgatgctttggctatattattaggctcagttaagacatttacttgccaccattacttcggttgacgcaagtctcccaattttgccatcctgacccaaacaatgttgctcaagcaaatcatttttat

SEQ ID NO: 2472 - DNA, 6493 bp, Zea mays
atggagtccccaacatatacccctgaggttgtacaccctacaacagatgcaattgaacctaatggatccgctcttaccccctgcgactgggttatccctgatatcgccagtaacccgttcctaccagcttcaacacagaccgaggatgccgattcactgcgtatgtctactagaccactaagacgtaaacaacatgtgccacgtggtgaaagacaagctatcttagcccgtcgaaaccggcaatttgaagcatccatttcaaggaacatggctactgtggctgaggatatcattagtgacgccgaggaaggggatgatcggacacaaccccatatgactgcaaagatcaacaacaatgttgatgacgatgacggtgtcgtatttgaagacgatgctgatgagaacgagggatacctattcgctgggcaatatgaggataccgatgaggatatagagatcgatggtagtcaagatgaatcgagtgccattgatgttcctgacccgtacgacaaggtgtatagcaacatccctgaagaaacccatatgctaaagactgttcccaactgcggttattgcaccgcgaagaagtttgagtatgagacacctggtttttgttgtcgtggtgggaaggttgagctagccccactggagacccctccccaactcaagaggttgtgggatagtgcagactctgatgctaggcactttcgtgataacattaggttttttaatggccatttctctttcacttccctatactgttgcctcgatagtatgacaactaatgtaagggattctggtatatacacgttccgagcacagggcatgatgtatcacaatatcaagtcatttggtagggatggtggggcagagcataaacaccttgagctttacttttatgatgatgatcccactctcgagcatcggtaccgtaagtgtcgcgaagagcatcaacagaaagacaaagaggttattcgacagatagtcgacatactacgtggaaacccgtactccgagcaccttaggaccatgggtcacgttgagaaccttgatgactatcgtatcgcgttgaacctagaccagacgttgaaccagaagacatataacacacctctcacttcggaggtggccgctgtctggatcgaagggagcgaagggcgaggccagttcagcaagagtgttatgctccatgggaaggagagttcaagccactgcatccgctcataccatggatgctacgatgcactatcatatccattgttcttccctagaggcgaacttggctggcacggaaatatcccaaaggttggagtatccatggacgaagtggatgcataccgtgcgacacatagggcaagtaatgcaaatgatgaagatgcggaatctcctagccatttatgtgtgtctgtacgtgactactactgctacaaattccagattcgccccggggtattcaatcctatacttcatggaaagcggctttttcagcagttcgcggtcgacacgtacataaagattgagaactctcgtttagattacatacgcaagaatcaggatcggttaagggcagacctgtaccagggcttggtggatagcatgctagatggagatattagaggagagaaggttggcaagcgaactgtgctgtcgacgtcgtttattggcggtcctcgtgacatgagacgtcggtatatggatgctatggctctggtgcggaagtttggtaaaccagacatatttcttaccatgacatgtaaccctaactgggatgagataaggagggagcttctccctgggcagacaccgcaagatcgtgcggatcttgtagtgcgtgtctttcatgcgaagctacaagagttaaagcatcggctgactaaacaggatattcttggtaaggtccgagcctacgtctatgtcgtggagtttcagaagcggggtttgccgcatgcccattttctacttataatgcagaggaagtacaagctcacatgtcctgagcagtacgaccttttgatctcagccgagatcccaagcaacaagtaccctgaactacgaaagatggttatcaagcatatgatgcatggcccgtgtgggtcgctaaaccctaactgcccatgcactaagggtcgtaaatcgtgcaagaatcattaccctcggcctttcagtgacacaaccttgcaagggaaggattcgtaccctatttatagacgtcgtgacgatgaccgtaaagaaaaggtccgagggtgcgaactggacaatagatgggttgtcccttataacccatacctccttcgtctcttcaactgccacatcaatgtcgaggcatgtgggagcatcaaggctgttaaatacctgttcaaatacatatacaaaggccatgatcgtgcgtttgttgttatgagagatgcgagcaaggcagatgatgatgttgatgagatcaagcagtatagagatgcaaggtgggtgactcctccggaagccttgtggaggatatacggctttgagcttagtcagatatctccacctgttatgcagcttcaactccatcttccaaacatgcacatggtggcgtttcacgagcggcaaatggtcgagcgagtcgtcaaccgtccaggtgttgataggtcgatgctcacatcatattttgaggcgaataggtttaataaggaggcttgtggcatcctatatcgtgacttccctgagtggtacacttggcagagtggtaagggaaaagtatggcaacggaggaaacgagatacaggtggacaagtcggtaggatagtctctgctcatccggctgagggggagcgctactatcttcgtgttctcctaaaccacgtgactggcgccgcctcctatgtggatctaaggacagttgatggtgtcaccctaccgacttttcgtgaggcagcagagagaaggggactacttgagtcggacaacacactagatgagtgtctcactgaacgtgctcttttccagatgccatcgtcgctgcgacggctttttgccacaatactggtttactgtgagccaagcgatgtggctgtactctggcagaaacacaaagattctatgtcagaggactatcaacacaagagtcagaacaaaactcatgttgagcagatggtattgattgacattaggaacatgctgcagtcaatgggaaaggacataaagacattccctctacctcctatgatcgacgcgtatgacgatgctattggtactgctcgagaggtttacgaggaggaaagtatccaaccgacagtggaagatgtggctcttaaagactctcttaacgaggaacagagggccgcctatgataagattatgtctaccgttgacaccgatcagggcggattattctttgtggatggacctggtggcaccgggaagacttatctatacagagtactgctcgcgacgctacgcaaccagggcaagattgcagtggcaacagctacatctggcgttgcggcttccataatgcctggaggaagaaccgcccattcacgcttcaagataccactcgctattgacgatggcgctgtatgtagcttcacgaagcagagtggaacagcagagttgctacggaaagcatctctcattatctgggacgaggcttctatgactaagagacaagccgtggaggcactggacaatagcatgcgcgatataatgggtcgccccgcactaccatttggtggtaaaaccattgtcttcggtggagatttcagacaggtcttgcctgttgttcgtaaagggtcaagggctcaagtggtcgcgtcttcgctacgaatgtcttacctatgggagtccatgtcccacttaaagcttgttagcaacatgagagcaaaaaacgacccttggtttgcggagtttttgctgcgcgtaggcggtggaactgaggaaacaaatagtgacggcgacattcgtcttcctgatgatgtgtgtgtgccttacagtgggagtgacaacgatcttgacaacctaatagactttgctttcccaaatctcaacgaaaatatgtctgattccacctacatcacttcaagggcgatactgtcaacacggaacgactgggttgatatgataaatgttaagatgattgatcgttttcaaggggagcatatggtgtatcatagtttcgatagcgccgtggatgatccccacaactactacccacccgagttcctaaacacattgacgcctaatgggctaccacctcatgttttgaagctcaagattggatgtcctgttatattgctccggaatatagaccctgcaaatggactttgcaatggcaccaggctggtcgttcgtggcttccaaagaaatagcattgacgcagagattgtactgggtcaacacgttggaaaacggattttcctatcgcgtataccgttgtgtccctccgatgaagagatgatccctttccagttcaaaagaaagcagtttcctgtacggcttagctttgcaatgacggttaacaaagcacagggtcagactattcccaatgttggtgtatacttgcctgaaccagtgttctctcatggccaactatatgttgctctatctagagcgacggcccgatcgaacataaagattcttgtcatcccagctgtcgatgggaggaaaaagttaaggaagggtgtaaagaaaacccccaccgtagattgtgggacatatatcaagaacatcgtctacaaagaggaaatcccttgtgaaccaagggtagaagtcgttcttattgatgatgcctttgttgaaaggaagtggatggagtgtttatttcagccgagcgcatatttaggtgacgaggttatagactgttacataaatttgataaaagctcaaaagcatctaaagtgccgatctggaggtcgcgttcacatagaaaatgctttccagttcaatttcctgaagcgagatggtgatcttgaaattaaaacagaggagctatatccaattaaagacatgacacacatatgtagcgctgaacgaagggtgttactttacctagaccatgacatggtgtttattccgataaacatccgagagacgcattggtatcttgctgtgatccatgcaagaaatatggagatacaagtgctcgattcacttggtacttcacaagaccgcaaagacctcactgactctattaaaggactgcaaagacaaatagatatgatatctcaacgtaaggagttaaaagaccacaggtggccagacctccaagttgcttcttggtcgctcagagaaatagacatgggatatgcaaagcagacagatagctcttcatgtggcctctttcttttgaactatatcgaatactggacaggggatgaactgtctgacagttttactcaggatgacatgtcacactttaggaaaaaaatggctgctatattactatcttcagacctgaataagagaagggggtgtctgttatacaaaaatgaaaaagaagttgactctggaagcccatctgatgttgagatattagaaaacccaacagattctaataagaggaaactactccacgtgcttgatgatagcgaagtagtgtttgaagatgaggaaggccctattactcaagcagacttgcaaaggtggtttgttgatgattgggataaaagagctcctgtaaaagtctctaacgatggttgcaccaatgactttttaatggttggtctttccacaaaggacatgccagtgaccaaagccgattcaatagatgttttatgtgattatatcatggcaatagaagacgatacgacactagagagaacatgggtgcgaagtttcaatccttttaagatagaaatatctgtcaaagacctgcaaaacatattaacgacaactcaagatatgattctaagatgttttgatatggctgttcggctgcttgccaataaagagtcacgtaaaccgaaagaagaaatcataaataatagaaagcattatatggacatgcgtttttggagaatggttggttttggtaaaataccaaagtaccatcaggatcctacaacagaagagttggccaaaacactagattgttggccatcaatgaattattatatcacgggttgtagatatgttctcatgccatggaaattcaatggatgtcacgcccttttcgtaatagatcatgttaaaaagcatgtgacttttatcgattttacaccgactcaagattggtgtaaacacatgccatacaagaggtttaataccagctaccttgttctacaagctatggccatgtgggggaatgacagacgactgaaatttgttggggatgcaaaaactcttcgaagaaactttgtgattgatcttttaagttatgaggacaattcgtgccgatatgccatccctgcaaacatacaacaaagacttgtcgatatcgctagaaaggattagctgattagtgaacagttgtcgacacatttgtctgtaactaatttgtgtgatattgataatgttttcc

SEQ ID NO: 2473 - DNA, 2338 bp, Zea mays
tggcgctggccgctggcgatggcgacgccggccccacccacgaactgtgtgaaccaggcgtcgtcgtcgtgcaggacagaaagccacgcacagcgagcgagcgatctctccctcctccatccatcgctccgatctctttctcacacaaccacagtggagttaccacggcaccaccggcggcccgtagaggtagctagcctttgccctccttttccatcgtcttcatcccctccctctccctctctcccttttcctccctccaacagctgctttgcttgctttccggcccctagctccaaaacccgccttcttatctccgtcctctggccgtccgtccggccggccgggccgcccgctagctccaaaaaggcatgcaggagccaggtctttagtctttactacctctctggcatcgcatcgcatcgcatcgacggggcgacgacgtacggcacggcacatgagatcatgagctcggaggactcgctcaagtccctctcgctggactacctcaacctgctcatcaacgggcaggccttcagcgacgtggcgttcagcgtggagggccgcctggtgcacgcgcaccgctgcgtgctcgcggcgcgcagcctcttcttccgcaagctcttctgcggcctcgaccccaaccacccgccgccgccgcccggcgcccgcgcggccgcggccgcggcgccggagctcgtcatccccgtcagctccatccgctacgaggtgctcgtccttgtgctccagttcctctacagcgggcaggcctccgtggccgcgcccaagagcgggcccctccccgggtgcggcgcccgcgggtgctggcacacccgatgcggcgccgccgtcgacctcgccctcgacacccttgccgccgcccgctccttcggcgtcgagcagctcgcgctcctggtccagaagcagctggagagcatggtgaaggaggcgtcggtggacgacgtgatgaaggtgctgatggcgtcgcgcaagttcgagatgcaggagctgtgggccacctgctcccacctggtggcgcgctcgggcctctccgccgacctgctcgccaagcacctccccatcgacgtggtggccaagatcgaggagatccgcgccaagtcccccgtccccgccggcgcgccgcgctcgccgttcctcacccaccactacctccccatcaacgcggcgtcgtcggccgccgaccgcgaccacaagatccggcgcatgcggcgcgcgctcgacgccgccgacatcgagctcgtcaagctcatggtcatgggcgaggggctggacctcgacgacgcgctcgccgtgcactacgctgtccagcactgcggccgcgacgtcgtcaaggcgctgctggagctcggcgccgccgacgtcaactcccgcgccggccccacggggaagaccgcgctgcacctggccgccgagatggtctcccccgatatggtgtccgtgctgcttgaccaccacgccgaccccagcgccaggacgctcgacggcgtcaccccgctcgacgtgctccgaggcctcacatcagagttcctgttcaagggcgccgtgccggggctcacgcacatcgagcccaacaagctcaggctctgccttgagctcgtgcagtccgcggtgatggtgaccacgcgcgacgtcgacgccgccggcgacgacgccgggggaagcgacggcggcggcggcggcaacttccccaggagcgacgccgacgacagcttggtgagcctgacgatgaactccacgctcatgtaccagggccaggagatggcggctgccgcggtggccgccggtgaggcgaggaaagggaacggcggcggcggcggcggcggccgagggagcccgtccaacttgtacttccccaatggcggcttcccataagtattatattgtgcccttcccttctataatccatcgtcaagatgatctttcttcttcttcttctgttggattggatctttgtgagaccatggtgtagctagctactagtactatttattttgagtaggagacatgcatgcgcgagagcaagaatttcatggtatttgatgtggattgttcgatcgacgactgtgggagacaaagcaactgttgctttgttcaaatgcttcactgtgatgaatctttgtaatggggcttcaacaatagtagtccaacattaccaatttagagctagcttgcatgaacaaggtttttttttagctgctgctgtttttacatgtctttatgcaatgcagctttttggtactgtagtagcctttggacgcatggcaggaaagcatggtgcgagcgagagccattcaatcgacacggcaatgaatccaag

SEQ ID NO: 2474 - DNA, 2825 bp, Zea mays
ttcaaaactatattatttcaaaaccctcaaactcttcatctgtccgctgtgaggatgacttgcgagaagttatcaaaatgaattctgacaaggggcaaaacacagagagtaacgtacgtgctcccaaaagccttttcaccgtacctctattatgttggattattagctgtaacgaaactgactaatatatttccacgcttgtctcgtagtgggcggcagcaggctgtgcacagaaaagacgctcgacgaccaagtccacgctgcatggctcgatcaaacgtgtcacggtcatacacgccagcctagcgtccggaggtgggtgggtggaacagcagcttccttgtattgtatgtacatgtactcggaaacatttttatgtgtccttcgccttcctccagactgcagaccaaatgctgcaacgatggcggccggccggccgtccctcgggcctcaccaccgtctcgcgcggcatctactgtctctgtacgctgctgctgctgctgctgccgtccatccacgtccctcgcgcacgctcgctgtctttcgacctcagcttctccaagccccagagccccggcctctcccagctggtcaactgcaccggcgacgcgtacatcaccccggacacgctcgagctgacgaggaaccggcgtgaccagagcagcacgtacagcctcggccgggccacgtacatgcacccggtgccgctgtgggacgcccgcaccggcgagacggccagcttcaccaccaccttctccttcctcatcagccgggacccgagcacgttccccggcgacggcatggcgttcttcctcggccacttcgggtcgagcatccccaccaacagcagcggcggcatgcttggcctcatgccggccttcaccaacggcacgggcgacggcaccgtcgtcgccgtcgagttcgacaccttcctcaaccacgccaacgacgacatcagcggcagccacgtgggcatcgacgtcaactccctcaactccacggcggccacggacaccagcagcaccaggaacctcacgtccggctacgagatggtggccaccgtgtcgtacgagaatgtcaccaggttcctggccgtccagctcaccatctacgacacgtcgtacaacgtcaacgcgaccgtcgatctcaaaagctacctgccggagcgcgtcgcggttggcttctccgccgcgactggaaaaggcggcgagcagcaccaggtgctgtcgtggtcattcacgtccactctgcaggaagcaccagcaccggcaccggcaccgccgccgcgtgctctgacacctggcagcagcacccagcagcccaagaagacatcttcagaaggaacactggtagtcgccgtgctggtgcctctgttgtcgcttctcttggcgtgtgcagcggcagccgtgctggtctggtggaaacgcaggagaaggagaagatcgtcgggaggaattggaaccagcgacgacgacgacgacgacaacggtcaccgagaccaggacggcagcagggcggagctcgagaggggagtggctgccagcgggccccgccggtacgcgtaccgcgacctggccgccgccaccaactacttcgccgaggacggcaagctcggccgcgggggcttcgggagcgtctacaagggcaacctcgtcgtcgccggcgaagcgcgtccggtggcgatcaaggtgttctcgtctgagtcgtcggcgcaggggaggaaggagttcgaggcggaggtgcggatcatcagccgcctcaagcaccgcaacctggtgcagctcctgggctggtgcgacagccgccacggcctgctgctcgtgtacgagctggtggcccagggcagcctggaccggcacctccacagcagcagcggcgacagcggcagcgagagcccctttttggcgtggccggagaggtaccggatcatcctcggcctgggctccgcgctgcggtacctccaccaggagtgggagcagcgcgtggtgcacggcgacatcaagcccagcaacatcatgctggacgacgcgctcagcgccaagctcggcgacttcggcctggcccggctcggcgaccacggcgggcggtggcacaccaccaacgccgtgctgggcaccgcgggctacatcgacccggagttcgtcaacacgcggcacccgagcacccactccgacgtctacagcttcggcatcgtcctcctcgaggtcgtctccggccgggccccggtggtcctgcggcaggacgagccgcccttcgttctgctcaagtgggtgtggggcctgtacggccggaacgcgatcctcgacgcggcggaccagcggctgaggaccggcgacgggctccgccacgaccagtgtatggagagggtgctggtcgtcgggctgtggtgcgcccaccctgaccagagcgagcggccgtccatcgcacaggccatgcacatcctgcaggcggaagacgccaggctcccgccgctcccgccgcagatgtacaagacggcgtcggacctcgccgtcagtggacgtgcctatggagctttgtccgttgaaagctacagtggtggctcctttacgactacgactgcgacgacgatgacgaccaccaccaccagcagcgactctaagatttctagaggcttgtcgaccacggccttgctccgagattcaaaagagagagcctgatagatctctgcatttctttctttcttatttttttttgggaaatgttgaaatggactgcccacggtctatatatggggcttaaatgacatcattactgaccagtataaatttgagctttcgcttatattaattgggttgaagcccaat

SEQ ID NO: 2475 - DNA, 1380 bp, Zea mays
aaaaaaaaagtaatcaacaacatctatctcatcgccgtcatgtcgccttgtgcccatgcagagcagcaagagcctgacgctccgcctctccacaacgaccaccatcgccaccaaacttacgtggagctgtaccaccacggccttcaccacgtgaagtcgtcggcgctgctgtgcgcggttggactaggcatccccggcgccatccaccgccgcggcggcgcagcaacggtctccgacctcgtcagcggcacgggtgtccacccggccaagcgcgcgcagctccgtcggctcatgcgcatgcttgcctgcttcggcatctttggtgccgccggcggcgacgagggtgagagcgagaccgtctacacgctgacccccgtgtccagcgtcctcgtcggtgacaaggacaaggaggcatcagcgacctcgtcagcgtcctcgcctgacatgtcggcactgctccggctcctggcgcgcccgagcacgtcggtctccaccttcttcgacatggaggagtggttcagagacggcgggaccacgacgctcttcgagacggcactcggcgtggcctcatggagcttgacgaagagcgacgccgcgtacaacagagccatgaacgaagcctgcgtcgcggacaccagcctgtccatggacatcatgctgaaagataccggcggctgctgcggaggaggaggcgccagcagtgtcttcggcggcggccggctcacctcgctggtcgatgttggagggggccatggcgccgccgctattgccatcgctaacgcctttccgcacatcaaatgcactgtgctggacctcaaacaagtgatcgacaaggtgccgccagctgcggccaccggtactgatcgtatcatcaatagcacggcggcgacggcggtgcagttcgtcgccggtgacatgtttgagtctattccacctgcagacgctgttcttttgaggcatgttttggactgctgggatgacgaacactgtgtgaagatactgggacagtgcaagcgagcaattcccggcagagaagctggaggcaaagtgatcattataaacgtggtggtcggctatggatcaccggacaagcttgtgaaggagacgcaggtgctgtttgatatgtacatgatgcggtacgatgggtccgagcgggaggagcacgaatggagagaaatattttcgagagctgggttcagtgactacaagatcacgcccacgttaggtttccattctatcatcgaggttttcccatgatgaaggttgtcaccatgcattattctatcgttatataaggttttcccatgcatgaagaccatgcatgcatgtgtattattacaaaccaaaaaaaaccccaagtggttactgttgttcttcata

SEQ ID NO: 2476 - DNA, 1666 bp, Zea mays
cacatggctgtagcctgtagcctgctgtgaggtcgttcattcccatgtagtagtagtaagaacctcccacatgaggccatgagcgacaagtttaaaaggccagcaccagcaggggggtagctagcagaagaagctacgcagacaaggcggctagcgtacgtacgtagcaatggcagcgcggcctgtggcagcaacagtgctcctgctgtccctgcaactggcgtggtggtcctcgtcgtaccccggcgtgcaggtccttgccgacgccgccgtgctcggtcggaaggcggggggcctcctcctcgccatgcgcgacggcaacgacgacgacaacgacaacgacaacgacaaacccgtgatcaatgcggagagcagtgtcaatgcggcggcggctgggccggggaggtacgccgtgatcttcgacgccggcagcacggggacccggatgcacgtcttcaggttcgacaaccacatggacctggtcgggatcggccacggcatcgagttcttcgccaaggtgaagcctgggctgagctcatacgctggtgaaccccaggaagccgccaactccatactacctctcctcaagaaggccaagagggtcgtcccttccgagctaatcgagaaaacccctcttaagctaggagcaactgctgggctgagactcatcggagacgaacaggcggacaagattcttgaagcggtcagggatctcgtgcacaccaaatccaagacgcagttccagtacaaccctgactggatcaacgtgatcgaagggtaccaggaagggtcatacctatgggttgccctgaactacctgctggacaagctgggagtgggggactactcgcagacggtgggggtggtggacatgggaggcgggtccctgcagatggcctacgccatctccgcaaaagacgccgccaaggctcctaaagcgccggacgccgacgaccgctacgttacgagggagtatctcaaaggaaaagactacaacatctatgctcacagctacttgcactacggcgcttttgcagctcgagtgaagattctggacgcgaagaagtatgggcagttcagttcctgcatgctgcgtggattcaaaggtaactacacatacaatgggcagcagcacgacgcgacggcttcgcctgaaggagcagtgtatggaaaatgcagggaggaggtagctaaggcactaaacctgagtgccccatgcgtcattagctgctgcggctgctgcaccttcaatggcgtgtggagcgggggcggtgggcctggcctcgacaccctctaccttgcatcaagcttccactttctagccgcacaggttgggatgatagacgggaaactccccagtgcaaagtcgaccccttctgcgttccgagtcgcagcgaagaaggcctgccagatgagcgtcgaggaagccaaggctgcgtaccccggtgtccaggacatccacgtgccgtacctgtgcatggatctcacttaccagtacacgctgctcgtcgacggtttcggactcaagtcgatcaagaaggtcacgctggtctccaaggtgaagcatggagagtactacgtccaggctgcgtggcctttgggcaccgctatcgaggcattgtcacccaaaatgggacaccggcaccgcgcgcatggcttcgaatga

SEQ ID NO: 2477 - DNA, 762 bp, Zea mays
atatcgcgctcgcacccctgacggcggcggctccttggcaccgatcgagccaccgtacgtcccgccgaggaggaacagactgcagacattctattctattctatcctatttctgcagaggaacgatggcggcagctctgaaagatgcattcgtaaggaagtctgtgctggcaacgatccgcctcgtcctaccagccggcgcagcccgcacgggaccggcctccagtgagcccagcgctgggcccctaccgggtgaacctgatggcgctctgcaaggagatcaacgccaggacgcagaggtacaagcccgacaccccgatacgggtcaccgtgaccgtctacagggacagcaccttccagctcgtggtgaagccgccctcggtgtcgtggctcctcaagaaggccgccgggatccagaccgccagccggttccccggccacgtcaccgccgcgtccctcaccgtccgccacgtgtacgagatcgcgaggctgaagctgggtgacgacccctcctgcaagtacgcgtcgcttgaggccatgtgcaagtccgtcgtcgccacggcccgctccatggggatcgccatcgtcagagatctgtgatcgatcgagcagcgcgtttgtctagttggtgctgtaacggctaatagtgttagtgtctcttctttaaaaaaatcagccatggcaggggcaggcgcggtggccttcatagccacagtctggcggcgatgggaaacaattgtttaagatatggtatatactgcaa

SEQ ID NO: 2478 - DNA, 2355 bp, Zea mays
atgcagcgacgttgcttggccacgtacgctcggaagggtcgtcgtcgaaagacgctggcgcccaccgatgcggtggtcgtccgcccactggcggaggttgctgattgtcaggttcagctggatcaggaggttggtgatctggccggttcggcaaatagcggacggacacctgagggtggtcggctctctgttttcgtgaacgggtctctgtcctgtgttgacggcaagctaattgactgcagttccgcgccaccaaaatctatttggaatgaagctctcgaacaggtaggagaggtagtcggcggtgtatgcaggtcgggaccaggaccgacgttgagtacatgcttgcattctcctagtccgagcacttcttctaggaataaggtgaagccatggcagggcaaattgccgtcgccacgacgttcgccggagttcacagttggacatgcactagaaaaagcgcaatggcgctgctcccctggaaggtgccacggccaaaggttgaagaagacgtcttcaatgggagcggtatcagcggagcggttagctgatggtttgaatttgaatgattttggtatggatgcaagtcaggcgatattctgggattctcatgcggatcctgtgctggaatcaaggaatgttggcttaattagtgcttgtccccgttggaatgggagggcccaacatatgattctcagtcctaggattccttataggccaactgctgggctggcttccttgttctcccgctcaggcaccagttcttctgctgccagggcggttcacatttcctcccggggtgtggctcctggcaccttcgtcgaggctgtaaggaacgcaatggcgccggttggtgatactggagggcgtggaggcagtcgcggccagcatcagtccgagggcgctggaggtttttccaccggtcagcagcagcttgggggcacgggaggatatgtcgctggtatgggactgaacactgactttggacgcggtggatcccaaccagtgttccatcctggttatggtggcggaggccgtccttttggacgtcggggaggtggacagggccgtgctggagcgtggcgtggtggaagaggtgcttctgccggaggccggttctatggtggtcgtactttgccaacccagtctaggggcggaggtgttcacagcaggttttcaaatggaggggcttcctctgtgatggtcgctggacagggtctgggaggttcaggggcttcttcggtgactcctcaagtatcaaacgctgtggacttgctccaacaggcaattacaacatcaattggcaacggtagcgttgtctggcctgttccagatagtaccatggaacagattgtttccttgctgcagcagtctgtggggaagagccagcacattcagaactcgagggggaatccagcaggtccgaatattgggtcccaacacagttcaaagttggagaccatcaaagaattgtctactccaacccacttggatgacaaggtgggttcttctgtgatttcaagttcaaaagagaaagtgccgttttgtttcaggtgcaaaaataaaggtcatcagttgagtgactgtaatattgagctattttgtgaaatttgtgatgtcaaaactcacttaacttcgaaatgtccggtggttcgtgcctgcaaaacttttgcaataccttgcgggtatgcggtggagggattggggttttactttataccccaacccattccagtaaagcagaggcaaggtggctgcaatggtacagtgtctattgtggagggttccatgaatgaagagcagattttgaatgagcttaaaagcaacacgaccagtgggaaatcggtgtgcgctggccctacacagctggatctggatcaatctcagggtacctgtctctcggtcaatgctgttagtattgaaaagttgggcagtatcccggaggcgttgacaggaaaagtgcatgcactgcgtcgtagctcgcgccgctctgattcggtgagtgaagactcgctagttcgagcaattcggctgaaagcgggatacaacctggacgatcagccgactaaagcgggttctaatcctagttcagttgcttcctctattggtcagttgaaaaaattagagattaatagagttcaggatcagctagtgggtaagaacgaggctgatttatctgattttatgggaaagggagtagtagaggacgaagagtttgatcatttcattttaaatcatttgtgtggggatattatgcatgaagagacggatggcactgatgggctgattaagtcagtctgtacaaaaccatctagtcagggttcgttgtgttctaagaaaaaaggtcgggcttga

SEQ ID NO: 2479 - DNA, 1383 bp, Zea mays
atgaagcggcaacgtgttggtggagttggtgatgacgaagtgcatctggaggaggaggaggaggaggtggagacggagattctcccactgcaccaccaccacgccgccgccgccgccgttgagaccgtcggtggccaacccgttgtcagcattctgggcctcggcgacgtggaatcggtgctgtaccacgaggaccactacgtagacgtcacgcacctcgccgtgctgcgtctccgcctcaacgacgccggcgagatggtgcgccgtttggttgcgatcaacgccagacgaccggtgcggatcagcaacgcgtcctctctcctccaggcgagcgctctccgttctggcctcctccaactctccgcggagctctcggacctgcaccaagcgcttcgcaacgactgtatcgtctgggagctggtcgaccacgtccggtccatgccaggccttggcctccccgtcgacctccaaccagggatccttcgcgatggcgttgaacatctcgtagtcgccattcgtaccacgctcgcggcgttcccagcggagccagctggccgccacagtgggcccaacaccactccggctacctcgcatgccgcagaggtatacacaaacctggccgagcgtatgagagcgcatctggacgccatggacgagctcctcacgagttcagtcgactaccccagcgtgccgctcgcatcgtttgtttcactggacgtggagcagtcgcaggagacggagacggagacggtgtacaaacgcatcaggggcctggatcacctccggctgctgttgacattgccgaaccagggactgctaactgagttctgtatatcacagctccacctcggtgatgccgatgacatgctacatgcgatcgaagctgcaatgcagcatcctttctattactgctttgctaatttcgatcgcgttgcaagtgcctgcgagatgaagaagatggtgctcaatatatcccacgcgctacagaacataggcagtggcctgatcgatcgccagaggcttggcgtgctcgaggacgtcgagaggaagtttacgcaggcagctctccgccacaccggggccttccgtgaggccgccttgggactcagtgccggtctattggagctgcttcaggaagttgatgatctgttggatgctcctgctgatatggctgcgattgtacaacgtgttgctgatgatcctgtacaagttcgtcgtatgccagatgcacaccaggctcctgttcataatcctgcaggccttgttgccctcactcctctcttggagcagctgctacaacgggttacctccatctggagcgttagtattgagtatgcagatgagagcttacctgacatcctcctggcaaagaccgtcctatga

SEQ ID NO: 2480 - DNA, 540 bp, Zea mays
atgccgccaaaatcaaagaagttagtaaaggggctgttcaagggcctgggcctttttcagggcagttcttcgagcagcagcagacgtcgagagctgttgagcgcggtacatggagatgaggatgagcagcacactgaggagcagcacattgaggaggagcagcacaatgaggaggtggagcacaatgaggaggtggagcacgtgacatgggaccaggccgcacagcatcaccagccatgggaccagtgggaccaccagagagagcagcaacaggcgtgggaccagtggggccaacagggcgaaccggctgacaacccgatggatgatggctcgggaggctcttcagcgacacgctcacgtcgctcaagaaaaagccactcagtaaagccttgtcacgcgatagagcgagaggctgataggactttatcatgccacatggagatcggaattgggaggacctgtcctttgacggcaagggacaccacactcaggttaaccttacgttgggttctctttgccgccttcactacccgggtatag

SEQ ID NO: 2481 - DNA, 2508 bp, Zea mays
atgtcagctcttccgtggtgcatcctgattcccatgctctttgcggcggcagcagtggtagcatcatccgcggcggcggcgggactgatagtgagagaaaggccagacgatgagcacgaggagaagccatccatctacatcgtgtcgttgcacggcgagccgcccttggccgcgacgagagtagttgaccggaacgcgacatggtacggagcacagaagaggagggtagcgcggctccacgaccagctcctgcagcacgccatggaacacgaaggcgccgcaggttcgcgctgctgctggaggatctacagctaccatcgctccgtcaacgggttcgcccttcacgcgacggcctcgctggccgagcggctgcgagcggcgccggaggtggcggctgtggaggaggacgtgggcacgcgcctcatgaccacgtacacgccgcggctccttggtctccccgacggcgtgtggcggccgcgccggggcggcaaaggggaagaggacgacggggcgggcgtggtcgtcggcgtcgtcgactcgggcgtcgaccccgaacaccccagcttcgcgtacgcgccacggccacgggcggcgccggccgatccgcgcggggacgacggtggcccgttcgccggggcgcgcggttgcgtcgtcggccccaggttcccgcctggctcgtgcaacggcaagatcgtgacggcgaggtacttcgctgccggagcggcggccgtgcttccgctggacccctcacgcgacttgtcgccgttcgacgccgaggggcacggcagccacgttgcttccatagcggcggggaaccgaggagtgccggtggtcgttggcggtgcaatgtatggcttcgccagcggcatggcgccaagtgcaaggttagctgtgtacaaggctgtatacccggctggaggaacaatggctgatctcatcgctgccatagatcaagcaatggaagacaaggtcgacgtgctggtactgtccattggaccagatgagcgtcctgctagcgaagtcacgttcctcagcatgctggatgttgctctgctgtccgcgaggagagccggcgtgttcgtcgctcaggccgccggcaacagcggcccggctgagtcttccgtcgtctcctacagcccgtgggtgacgaccgtagccgccgcgaccactggccggagctacacgtcgtggctagtcctcggtgatggtcgccgcattccgggactcggattgtccgcgccgacgatccagtccagacttgtcgccgccaaggacgccgcggtgccggacgcggccagcatggaacacgcggaggaatgccagcacgcggaggcgctcagcttccgcaccgacgtgctgcgcggcagcatcgtcgtctgctctttctcgcgagggttctacaacggcacgtcgacgttgagcgccatccgcgacgtggcccaggctctcgggttcgctggcttcgtcctcgtggccgacgcgcagcatggcggcgacttcctcgcgcagccgctccctttctccgtccccggcgtcatggtccctcgggtcgccgatgctatggtgctatggtcgtactacgccgcgcacacggtgtacggcggcagcgcaaccgtgttcggagccacagcggcgatcacggaaggaagagtcgccgcgtttacggacgcggcgccggtggtggcgcggtactcgtcgcgggggccggacgtcattgacagggagtcaacgccggcggacgtgctcaagccggacatcctcgctcccggcgaccaggtatgggcggcctggagcgcgctcagcgtcggcgagacaatattctccggcaaccatttcgcgatgatatcaggcaccagcatggcggcgccacatatcggcggcgtcgcggcgctgatcaggcagaggcacccctcgtgggggccttcggccgtcgcctccgcgctctccaccaccgcgcggaggcacgacaggcagaagcgcccgatcatgtcggagggcttccagatcggctcgctgcacacggggacgccgttccactacggcgccggattcgtgaaccccgccggcgcactggaccccggcctggtcgtcgcgccagagcccgatgactacaccagcttcctctgctcgctgccacagctcagccccgacgacgtgctagcagccaccggtttggcctgccagacgccactagcttctccggtagacctcaacctgccgtcggttactgtctccgcgctgcgtggctccctattcgtccggcgcagggtgacgaacgtggcgagcaacgccgaaacctacctctgctccactctgccgccggccggggtgagcgtcaccgtgcggcctgcgtggtttgaggtggcacctggggaaactcaggaggtggtgatcgagctgagagtgaccagggcgtcaaacgcgttcagcttcggtgagatacttctcgccgggagcttggaccacctcgtgaggctgccgctggccgtgcgaccccttgccacatga

SEQ ID NO: 2482 - DNA, 1572 bp, Zea mays
aacttcactcaaggcaccggggccgtacgcttccgtgcccaccgccatgccattgctcagcgaccctggtcctggtgcgcgcgccatggcgaagcagttgaaggtgctgcttcctccttccttccacaagatgcgcatctccgacgaactctctggttgcttcgaggccggcgacggggcgccagagccgacggctctagtggtcagtcccttcggcaaggtgtggcgtgtggctgtgggccgggacggcgacggtgcattcctggggcgcgggtgggcggagttcttggccgctcacggcatcggcctcggtttctttgtggtgctgcggcacgagggtggcggcacgctcaccgtcaaggtgttcgacaccagcttgtgcattaaagggttcagcgctccggctgcagttatgacatccagaggcagcaaaggtgttatctgtaagccacagttcatcaggatttttcatccatatctctcagaaaagatgatattgcctgctaggtttgtgaaatattacatcacagacgagtggctaaacagccagacggccatcattctcagcccccttggcaaattttggcgtattgagcttaagaatgatcaatcaggcatcttcttcacaggtggctggtcacagtttctggaattccatggaatatgtaatggtgatgttttgcacttgagatacgaagggaacatggttttcaaattcaaagcatttggtcttggtggatgccagaaagatttcaagaaccagaacgctgggattcgatcaagtaaggaaaaacgacaggaaacaccttccatcaggaaacgtaaaagcaatgatgagaagtcaagaagtgaagaaaacaagaggccaaaaggtccaaagaattcccgattactagaaccctatcgtattgggacatcatcttggataaggaaaagcatcaacacctatgcacttgagcaccttcttccgttgtcaaaggagttctgcggtcggattgggttccagatggcttgcaagatcacgcttaagacaaaaatggacagcgccagatcatggctggtgcatggtgctgcatacaagaactactgctgcctcgtcggagtggcctggaagagcttctgccaggagaacaggatcaagccaggcgacctgtgcaccttcaacatcatcgaaaccacactgtggcatgtcactatcacgcactcaggtactaacagaaagcaagaagggtcaccttgctcatccagaagagaggacaggaccaagaagggtggttcaagaagtaaaggaacaaaggaacggaaatcccctatggcatctttgaccaagcaggctccatcatacacaagatgagtctacggcattggaccactattttggatgatacggaaggagatgaataccaacggccctctcggaagttagtaggttcacgtcgttaagttacgtagcgctgtcaactagctaactttctaggggctatagtaagccgtctaactttctagagacccagtaagcctctaggatgttaatttgactagcattataaatgatgtttatttttattttac

SEQ ID NO: 2483 - DNA, 2720 bp, Zea mays
atgctcagtaacatgcgtcccatcaagctgcaggcttgggaggacaccttcgggggcaaggttcgcgacatccggcgagaagagctcgggtggctggccaagatcatgctcttcatgtgcgccaacacggtggtattctcgagcggtccgctcgctatgacggtgctcgtgttcgggacctacctcgcctccggtgggcagctcgacgccggcaaggtgttcacggccacggcgttcttcggcatgctggaaggccccatgcggaacttcccgcagactattgtcatgtccatgcaggcgtttgtgtcgctggatcggctgaacaaattcctgacggacaccgagatcgacaccgcggccgtggagcgcatcgagagtggcggcgctgaggacacagtggccgtcaaggtgcaaggcggggtgttcgcttgggatgtgccagcggacgaggagatgaagggcaacaacaacaacagcagcaggccccgccatgaggtggcagagaatgaccaaggaaatcgggcggagttggtgacagtgctgaggggcattgacgtggaggtgaggaggggcgagcttacggcggtggtcgggacagtgggctccggcaaatcgtcgctgctgtcctgcatcatgggggagatgcacaagctctccggcacggttagcatatgtggaagcacggcatatgttgctcagactgcttggatccggaatggaaccattcaagagaacattttatttggaaagccaatgcattcagagagatattcggaaatcgtaaatgcttgctgcctggaaaaggatttggaaatgatggagtttggtgaccagactgaaataggagagcgagggatcaatctcagtggaggccagaaacagcgcatccagcttgcaagagcggtttatcaagactgcgatatatatcttctcgatgacatatttagcgcggttgatgctcatactggatcagctattttcaaggaatgtctgaaaggcatactcaagaataagactgtgttgcttgtgactcaccaagtggacttcttgcaaaatgtggatactataattgtaatgaaagatgggttagtcatccagtcagggatctatcttgagttactagcatcatgctcagaattttctgatcttgttacagctcatcatagttcaatggagacagcaggggcacaagcttttcatgttcagaacacagagagctctcaggcttccactggatctgtagatgccccatctttggcatcgaaatccaatgctgaaaatggtgaatcagttggcagtgcaacaaacaaagaagcaggttcttctaagctgatccaggaagaggaaaaggagagtggccgagtaagctggcgtgtgtacaagctatatatgacagaggcctggggatggtggggaattgtggtcattttagctgtgtcactgctgtcagagggctccagtatggctagcaactactggttatcatatgagacatcaggaggccctgtgtttgacacttccttatttcttggtgtttatgcttcgatagttgctacgacaattatattggaaatgatcgccactcttattgtgacattcatggggcttcaatcagcacaggcctttttcaacaagatgtttgacagcattttacgagcgccaatgtcattttttgacaccactccttcaggaaggatcctaagccgggcatcatcagaccaatctaagattgatactaaccttgtgttctatgttggttttgccacatcaatgtgcatctcagtggttaccaacgtcgctattacttgccaagttgcatggccatcagtaattgcagtatttcctctgctgcttttgaacatctggtatcggaaccgttacattacgacatctcgagagcttacccggcttcaaggggtaacaagggcgccaattattgatcactttacagaaagctttctgggtgccccaactgtaaggtgcttcagaaaggaggatgagttctaccagataaacctggacaggatcaattcgaatctgcgtatgtcatttcataattatgcagctaatgagtggcttggatttcgcctggagctaattggcacacttattttgtctataactgcttttctcatgatcagcttgcctagcaatttcatcaagaaagaatttgtcggcatgtccctttcctacggcatttctctcaattccttggtgtactacacaatttccataagctgtatgatcgagaatgatatggtagccatagagagggtgcatcagtacagtactctcccttctgaggcagcatgggaagttgccgacggtcttccctcacaagattggcccagccgaggagacattgatgtgaaagatctgaaggttcggtatcgtcaaaacacgcctctaatcttgaaaggcattactgtgagcatcaaaggtggagaaaaggttggagttgtgggaaggactggcagtggaaagtcgactttggtgcaggctttattcaggatcgtggagcctgcagatggccatatcatcatcgatggtgtcaacatctgcactctggggcttcgtgatctgaggtctcgcttcggtgtgattccccaagaacctgtgctcttcgaaggaactgtacggagcaacatagacccagcagggcggtattccgaggctgagatatggcaggaaatacaacctaaacctatgctatgttgaac

SEQ ID NO: 2484 - DNA, 2064 bp, Zea mays
atggcgcttcccctcccgcctcttggcctccctcctccaccccttcgtctccctcctctggccggcgcctcagccccttcatcccacagcctcacgccgattcttactccaaggccggcggccactacccttccctccccggcgtcggctgcttcccctatcccctcccgctccccaggttccttgcccggtggacgttcgaaagctcagcggtggagagaggaaggcggttcgtcttctgctgttgcgcaggatcgcagtgaggtccagcgctccttcaaggatgtgctgttggccgtgaagcctcctgcccctggtggtgctggcggtgttgatgctgatgatggctgggtgagagttgaaggtcgccaggctcgacgtcgagcttctaaccgttcgaagccccttcccaggcctgtccctgtcgatttgcgcgggaagtgcttcaattgtttctcgccttcccatcgtgcagctgtgtgtcggagcctggttcgttgcttcttctgccggcggcctgggcaccgagcgatcgtgtgcccctgccggcggacggccttgccccctccgcggcgtgctctggtgtggcgcccggtctccaggaagcccccttcgacagattctcctgccggtgacatggagggatgctcgttggccggcatggctggcccttctggaggcttgaagaaacgcactcgtcgtggtcagagaaggaggaagactggtcctgagggagggcatcctgttctggtggcgcctccacccacgcctgtgagccccgctcgacatgtaaggatcatcgggcgctccagggaggttgatcgggccgaggctgaccttcgtcgggcgctgatcgtcacagttcttggccacatgagttctgatagcgccgctattgttctggatgcgctcgcctcaaggttttcttttgaagctgatgcgctccatcttcagcgtgctgtgtcgaactcttttctggtcttcttccccacagaggatcatgctactcgtgtcttcaatggtgggcagtcacttttcattcctcctgtcaggttgcacctcaagccttggtctcgtcaggccttgacctctggtggaagcgccctgcctctgctgctggatatcgagctgagggggattcctgcccacctctgggagcttggtactgctgaagttcttttgaatgggttttgtctgattcaggaactgcacccagaatcagtggagggcattgatatgtccgttctcaagctaagggcgtggagttttgatccggattgtttgcctgctgttttggatcttcatgttcaagagcctcttgttgaggagggagatggtgccattttccctcgctctttggtttatcctattacagtgaaggttacccgttccggtgttaggccggaggggagcttgcctccgcctccgccatcacctcctggtgatgtcgacgaagaccatgatcaagatcatcagaggcggcggctgcttcagcatggcccctcggcttcctcgtttcggacctcggtacactcgcggctgggcccgcgtgccccttcgtcttcggtggctggtggaccagttgatgccgcaattctcccgtctgcttcgggtgaagagttgacggcgcctgtgtcttccagtccgctggtttcctcggttcagatgttgggggcaccagttgaggccgctactctcccgatcacctcggtcgtagagttggcggcgcctgggccacccccaccttgcttggacgcttctccggcggttcctccccaggtggaggaggcatcgcgtgctgttggctctcacgcccaggatgtacctgtcagtttggatgaaaggagtttggtgtctacctcgctgccctctgctggcttgcaagaccacagtttgaatgggctccccgctgctggctctcagttttcttctgcgggctcaagggctgttgatgttgagttgggttttcagggtgattgcagtttaaaggcattgagttctatctttgatctgcctatggggccagctatgcctttggccaccttgtttcaaagtatattctag

SEQ ID NO: 2485 - DNA, 204 bp, Zea mays
atggcgtccgacgcggcccagcgtcccacgcagccccctcccactcgcggtcgatccccggcgcagtgcgcagccctgcccggcgcggcctacctgcgcgactcgcccgcggcgtgctcgctgctcacggcagcgcccgacgcggcgtgctggctcggtccagcgcgcggcttcctcgcgtccgtggcgcggtgcggcccctag

SEQ ID NO: 2486 - DNA, 2743 bp, Zea mays
gatcctttacgtattttatgtatatgtgttgtttcatttggcaggaacatcagtgatgaagaacgtagaccgaccaccttccaatccaaaacggatcataatccagtctactcaggagtgcttcagcgttgacataccccgtgctccggcggggactgttagacccgaaacaaggcatgttgctgatgaggatgatgactttataccattatccaagaagcgtaacttggacgacagccctgggaaagttttgaagaaggtagtcactaagcggaggaaagcagtgccccccccccgacaacagaggctgaacgtcagatgcaacccccaagatgtgttagtaagcatacagatattaaatgacagacagcaacaagcaattgcacgtaggggattttctagtattcttgatatgagactggacgcactcggcagcagatcacacttagcttggctgatggaaaagctccaccacaatgacatgacaattcgagctggccctggaaaggagctgaaaattacaaaggatacggtgcacctaattttgggtttaccgaatgctgggggaggaactgcattgggcatcgatgaagttgttgctgccaacaatttgagagctgaacttggtctatcgaaagaagattttggggttacagctcttcaagatcgtttgaggaaaggttctgacgatgatttaagcatcagatgctttttcttgatattgttcaataggttgttgttccctactgccagctggggaataacaaaccatgaggttcttttaaccgaggagatggatagtttccaccagatggactggtgccagcttattttcaatgatttatgccaagctgccaagaagtggcataataggagcgttacgaacgtttctacaaccatctatggatgttccatcgttattcttctgtattatttggatcatttgcatgactcagcggcaccccagaacaaacgtggaacaccacaaatcaaatactttgatagtaatattattcaagccctgacaagagctgacaagggcaagatacgcaaaggagaagaagcatttggacattgctcgcataagaccaggaccaacacttttgatgttcctcgtcctgacccatctggacagcactcaattcacatcgaactcccgctcatcagggatttgatatcaagcaagcttaatcagcttccatcccgccaccgcatgggtttcatagagaagctgtcacattttgatgcggaggttggtaaggcgtgttcagttattaaacagactcttcagcagattgttgagaaacaattcaatctatctgatgtttttggcgagttaattgatgaggtcctccgtgccgaggcgggtgacaacgaagatgcttatgatgtgcagaaaaccacatcaaaatcagatgatattcttccccagacagctgaaagttgccccgatgaagctgatattgatccactggttcatacaaatataacgaaacagaacaaaacacctacaacctcagtgggtaaacatggtgacggtggcaagaacatgccgaccaatacaaacgtcactcctaaagcaacaccacacatggatcctgacgcgccgatatttgatgcgactccgcaaatcaagtctactggcggcgtacaacaagtggcagaaacagacttgcctgacagtggtccatgctttgatcagactccatctgaacatgtttatgttgaaaccgatccagctacaaacactccacaggttggccaggcttctcttgattcggagatgcaaactgtgttagctctacgcgaatatttgtgtggtctgcaatctgacaccggcaggaccataatagattatggtgaatattcagcgacatgttctgacatatatgaatcttttgccgatgggaagtgtctcgacaatgtattcatgcagtgtttcatccaatgtgttattgatgatgcaaaaaatcagcagacttccatgagttcgaacagtttggttcttgatgttaatgttgggtcaatactcaactttgaggaacaggaacgacacagtcgcaaccctcaaccttttgatgaatctgtactccacacacttctagacaattcattgcctgagacagatgaattggaccaatgcaaagcgataacaatcgtatttcataatccaaacataattccttttaaatggaacatatcacattgttatgcttttgtaagttaccctgttaattttatgctttttttacacggtcagatcatggtccccatggtaagcagggggcattggacattgtatgttgtcaacaaggtcaagaagtgcattcatattttagattccaacccatatggaccaacacttggtggaactacatggaaggactatcattttgcacatttgggctcaggtggcagaaagttaccatgggctaaggttattatgagcagattaaacaaagcaatacaacatgtacggcccagtacatgctttcccaagtttggtaacttcacaattgacttgtgcccaaattgtcctaacatggcagctggatcaaatgactgtgggttttatgtcatgggttacattctattttatcaatgcgatgaaggatctttgcggtcagacatagaagcaggcaacaccagtgagatacggtctcttgcgctgcattacatcacattccacccgaagaacaaagcattatcgctgctccaagacatccaaagattcaaggtctaa

SEQ ID NO: 2487 - DNA, 84 bp, Zea mays
ggtgacagaagagagtgagcacacggccgggcgtgacggcacgtgccgtcgcggccgcgtgctcactgctctttctgtcatccg

SEQ ID NO: 2488 - DNA, 1073 bp, Zea mays
ctgctgtagataatgctacacttttccggggttttctctctctctctctcccgcgagctgactgacggctcctttatctcctcccgcgtgcatcccccagctactcgtcattcttatccgcctgcctccgccctccgccaccgctacctttatagctctagcttccttcctccattccctcctcatgccttcgtcttcgtcgtcctgcagccccgcaatagagcatcgtacttcatcgttccacttacatcgtttgttcgttcgttcttccgcgtgatctgcttgggagttgggggcaatggaggcctacgtcctgttcgcgcgcgccaaggagcaggaggaggacatcggctgcccgtccgagtcgtccgcggcgcgttccacgtcctcgtcgtcggacggggtggacctcgccgacgacgccagctcgtccgggtccacctgccacttcgagatggcctccctcatgacgcacctcccgatcaagaggggcctgtccaagttcttcgccggcaagtcgcagtcgttcgcgtcgctggcggcggtgggcggcatcgatgacctgcccaagccgccggcgaagcggctcaagacgtcgtggagctgcggcgtcggcctcgaggacgcgcgccgcggccctccctccgtgacgaccgccaataagcaggcgtccagcagggcacggctgacgccgtcggcgctcggctcgacgccgagaaggctggtgcgagcgcggccgcttgtaacggcgagaccggaggcggcggccgggaagcccctgttatttgcatagggggaagggattcgcctgcctaccagtaaaatcactatcacataattcggctgttacttgttagtttgcgcggaacttgaaaagtgaaatggccagagatttgacccagtttccgcgtgtaaatatttttgcaacagagctaacatgttacaaaggtgtccttttttcatggatttgacccagtttgcaatgcatcatattggttggtcctttccataacttcgtttcgtgtgatagatctcctatttgatctgaaactggctaacatgttacaaatatg

SEQ ID NO: 2489 - DNA, 2960 bp, Zea mays
cagcgacggcgcagatcgcaaagcaccagggcgatctcgccgcccagcacgggcggttcaggtcaagcctcgcgtcagccgtcaggtctcctccgggcagcgccgcgtgcgtccccccatcccccccattcgacgagagagagattgccccccacccattcgacgagatctcggaggcagcctcgaggtaacctccgtcctccgcgtaacttgtggcttcctttctagctcgattctgattatcccggctggtgatgcgctcttcggtcccgatcccggtcccgtagctggtggtttgtgcggcggcggcggcaaattcgtgcaatattgcgtatcgcctctgttaacctttacccaggcgtccggacatgcggagggggcacagttttgtatcggttgtggttccgtgcttctgcggtgggattgcggtggattttggggcttcgattttaggtagagcacttcgagctgtgttggcgtagaaaccctagatccgcgatcccggtttggtgctagcctgtttggtttacccactttggtctcgtctatagccatcataggtcgaattactatcaggttcaggtccctattctctgcctcggttcgatggatgaagtccacggtgcacagctcgtcggttaggcagggagtgaccctgttctgattctcgtggtttcaggggaggatctaggtccagggagattaatctcgaggttggacctcacatttttatggcctttgactgcaacaaggaaagaggagtttcttcgcctgacagttgctcccgcatttgcaccgagggcactctcgtccaggcaaatcccttatctcactactggaagcctaaacgtttggagaacttcaacaagttggagaaccagaagtccagttatgaatctgctccgagtggctctgatccaaaacaggatgctgaagcgagtgatgaggcaactgcctcactgtgtggcttcaggtgcttcactgatctgccagcttcgttggtctgcgaggtccttgcacgtctcgatgcgaaggaccttggaattgtatcctgtgtctccaccctcctgcacgccttagccacagatcatcagggatggaagaagttatactgcgaaaggtgggggcttccagacctccccaccaccctgaatgggcccttgctgccgggtgtccccctagatgggaagttttggaaaacatttttcgtggagcgggagtttaggagcaaatccttcatgggaagattcaatctggatattctccgtggccacaatgaggatgtgcgtgctgtgtcccttttggtatcagcaaatctgatattcacaggcggccgcgattctgtggttaggatgtggaagatggaggaagggttattgattgatacatcccgtgcacttggtggcaccatccgggcgattgcagctgactcgaggcttttagtgagtggaggaactaatgcctatattcagtgttggagggccgttgaaggcaatggtcaattatttcacatctctggaagtggtaccgaccagaatgcggagtttcgcctctggggtcatgaaggtcctgtgacttgtcttgccctggattcactgaggatttatagtggttcttgggacatgactgttcgtgtttgggacagagaccagatggagtgtgtgcaaaagttcatgcatgcagactgggtttgggatcttgctctgcgtggaaatactgttgccagtactgctggtagagatgcatatgtatgggatatcagggctggcgagttaacaagcttaatttccaatgcccatgttggtagcgcatattcaattgcttggacacacctgccagatgtgctgtttactggtggagaggatggtgctattcgattgttcaatgtttctgatgtctgtgatgatgagggtgacattaaaccagtggcaacttgggtgccacattcaggtcctgttcattctcttgcttttgagtatccatggcttgtgtcagcctcgagtgatggcaggattgcacttattgatttgaggaagcttctgtcctccaaaagttcatcaaagggtctgcgtgttaagagagttgatggaagcgcaatagagcctccacagaggatgcttcatggcgttggatgtgatctcttctccatcgctattggtgcagataggattgtatgtgccggtgaggatggttctgttagagtctggaacttctcagaagcattggagattgagaggagggcacaggctctaaggagtttgaggcaggagaaccgcatcaggcggaggaaatcacaagcggagatgaatacaaatactagaaggcctgaccagtgttcaatagccatgaaaaagaaccaactgaagggtgataagagcgcaacttggcacaacaagcgtgccattaatgagaaggccaagtcttagattaggattgtcattggtagccgttcactgagttgcagtctatcgtggccatacattgccatcactgggtactttcttgttggtcgtacttgagattttattttcactgaagccgggtctagtaacacgttttcaacattgacacattcaaatgttcaactttatgtggttatacaattaccaacttaatatatgcaaatcttctatgcctagcatatattgatcaaaagaaagataagttcctcaaacctttcgagttctgaaagcttttggtcttttagctttcatgttactgtaaaagaatatttagttttcagtgtccgggtatttgtactgaaggcccttctcccttctataaattagtgttcttcatcaagaaaaatcatgtggttgtacgccaccatcattgtcaatggtaggtttgcatttcatagtaaactgctaatcggacagtgccagagtcgtaataagtgttactgtacctgaggcgggctatcgcatgagtacggtcttgataaatcgaggcaacctttc

SEQ ID NO: 2490 - DNA, 2113 bp, Zea mays
aatccatggctgtacctgttgttgagaagtgatgaaaggcgcgcaccgttgtcaaatgcgtcgggtggctgagggagctgaggtcaccgccagtctcttgtcacaccaaacacccagtggttcaggctggccaaagttatgagttatctgccctgtcctcccaaactaatctagtcccaggaaactaatttcaacacacaactggacgacggtgcgttgcgttggtggccgccggcgacgatgtcgtcgtccgcgggcgacaagaggaagaagacggcgtgcgtgaccggagggaacgggtacatcggctccgcgctcatcaagatgctgctggaggacggatacgccgtcaagacgacggtcaggaaccccgacgacatggacaagaactcccacctcaagggcctgcagcagctcgggccgctgacggttctccgcgccgacatggacgaggagggcagcttcgacgacgccgtcgccggctgcgactacgccttcctcgtcgccgccccggtgaacctctcggcacaggatccagagaaagagcagatcgagccgtccgtccgaggcacgctgaacgcgatgcggtcgtgcgcgaaggccgggacggtgcggcgcgtgatcctgacctcgtcggtggccggagtctacatcaggccggacctgctgcaactgcgaggcgacgggcacgtgctggacgaggagtcctggtccgacgtcgagtacctcagagccaacaggccaccaacctgggggtactgcgtgtcgaaggtgctcctcgagaaggaggcgtgcaggttcgcgggcgagcacggcatcagcctggtcaccgtctgccccgtcatcaccgtgggcgcggcgccggcgcccaaggtccgcacgagcatcatcgacagcctctccatgctgtccggcgacgagcgagggctcgccgtgctcaagggcatcgagaagacctccggcgcggtgcagctggtccacgtcgacgacctctgccgcgccgagctgttcctggcggaggcggcggcggccgacgggaggtacatctgctgcggcctcaacacgaccgtcctcgagctcgcgcgtttcctggcacacaagtacccgcagtacggcgtgaaaacaaacctcgacggcgatgaacagcagctactcgagaagccgagggtgagggtgtcgtcggagaagctcgtccgggaagggtttgagtacaggcacaacacgctggacgagatctacgacaatgtggttgagtacggcaagtcgttagggattctgccctactgatacatagatgcccgagcttaattaagtacgagggcagcatatatgttatcggacatatacgagtcttggaaagtaattaaataatttatggagatatttttcattggaaaaaacagtgtgagagttctagactaaaggctagtttagaaacttaaattttctttggtattgtaggggattgaggtagaaattagttcatttcctttagaacccccacaaaatttccgatggaagcttgagtttctaaactagctcaaaattgagctgaaaagcacttttgaacccccctccccctacattttactattgctgctgaacgacgtggaggtcagattccatgtccgactgagaggatcgtcgaggtcggcgcggaaggcctccaggctccaggagggcgagcgtctgaggtgggagtgggacgtcttcgccatgtcatctgcggtttcagaatcgagacggccaagcacgtttggtgtgatatggaatcgtgatgaacagctgtcaggactccacccacgggctctccagtggaaggtgcggctgaagaagacgcgatgcagaaggcgacgccggtggctgatgaaggcgctgtggagaagacgccggctgtgaatgggccgcgagtggcaagacgtgttcgcaagcccaatgtgcgtgtatgtgggccggaatggttgaggcagtagtgagatgtacaaatatgtaataagcagaacgctttggacagagaatgatgagaaatcacaataccaatccccgcttcccccgctatcttcttcttcttcttgcccacgaaacctctcttctctgcttctgctaacattct

SEQ ID NO: 2491 - DNA, 822 bp, Zea mays
atctccctttctctctctctctctctccttcacgtggcgccatgcacgagcgctaatcagacaagcagcaccagcaccaaaaacaagaggcgagggtggcctggccaaagtgacccacctcaccaaccatcactcacccagtcaccctccataactcttctcctcctctctcccagtctcactcccctcacttcgtgcatggtcttcagagtagtagagagagcaggaggaggagcacgagagaggagcagcgaagaagaagaagaagagcagcaggcagcttccgatgtgctgctacgtgggcaaggccaccaagatcttcctgtgcctcgtggcggcgctcctggtcgcgggcctcgtcctcggcttcggcctggcccgccacacgtggggagccgaaaggacccggcagcaaccggactgccgctggcccgactgccagcagcagcaccagggcggcgaccccccgctcgtcccggatgccgtcaccacgcagcccaacccgctcacgcagccggccgtcgccgcgttccccggtgccaccgccaccccgtcgccgtccgccgccgtcgccgcgccgcccacgggcgtgccgtactttggaccacctggcccgttcgtcgtgggcctcggcccagctgctcatgcgtgaggggggctgtctttttcttttttttctttacttttgctcgtagtcctctcccttctggaatcagtgcttcagtattgtttattattactgtatcattttttatatgtttcgctagtttttgacccgtttcgctgtacagtttggtaaattaatccggttctccccctctc

SEQ ID NO: 2492 - DNA, 568 bp, Zea mays
aaaccaattagcgtctagggtttagcctctccaacccacgtggttttgcttcgacaacgacgctttggcatcgcacacgacgtgagaagaaatggcatctttgtcccgcacagccgtcgccgccgtgaggtccgcagcccgctcagcaccccttaccggccgcgtcccaggcgcgccactgccttcccttgcctcgtcttccgctgcccggtccgcccggatcctccgcaggtcggcggccgcgtcgtcgtcggggctggagacgctcatgccgctgcacagcgcggtggcggccgcgcggcttaggtcctgcatcgccgttgacttctcctgctggagctcgctctcacaaggccaagttcatggagctactgccttaggagcgtgtgttcattctctgacttattggctgtcagtgctaaatggcgcataccaatttggaaacttgtgaacttccatagtagtttcgattttgtataaccttttgtttctggcaacgttgacaaaatttgatcagcagggatctttatgaatgcttttcaaagttacactagtacttgtaataaaa

SEQ ID NO: 2493 - DNA, 2421 bp, Zea mays
agcaaatctctctctctctctccatctctccacacacagccccttcgctgccgaggtccctcgccggacggggggtgaaggacgaaggggaagaaaggtgcgcgggcatgctttccacaggctttcttgaactgtgaactcgtgggcgtggtggtggtggtgctggtgctgggtgtgtgggacggaatgattggctcctcccagtcccagtcccagtcccacccaccaattctcttccccccgaccggccgtgaattgaattgaatcgaatcgcatcgctgagcttccccccggctcgctcacgcgacctgttgatggttcaagaaagcccatggaaaccatgcagcctccctcctgtgcagctgtgctctggtggcggagaattccgccggttccgggtgagggaattcagcagaccagccaccccgatgcggattcgtgtgtggaggagagttgcagttgcagcgacgactccaactccaacgaggggatccacgcctggactgttctgttccaacgaggggatccaactccaactcagcggcaggcagctagctgtcctgttcgaaattcaaaacccggccagatccgtgcttgcgctgctcgccggggctgctttgtccactcaggccatcgatctccagttccatgcgtgtggtggcgtttgctgggcagatcagttattactcctccactccacaccactgcaccggccggcaccgctggtaacgcacgcaggtaggcggccaaggccatgccaatgtcatgcagcgggattgatccatgcgtcgtccattggcgccctgccctcggctagctgcggctgtgctggaaagagatctggtggccgaggaggaggagaaggcgaggacgaggacgagggacagaaaagcagcaaaaggctcttgtggttggcatgcctacaaccaacgtcccaaccaggagcctgaaaaataatccccggcataaagccatgtgacaggcgacagcgatgccatctgatccgttccgttcggttccccccagcaaaccgtggtgaaaatcacgcggcccccgctctgccatctacccctgcacgagtacgacggtacggcggctgctcctgcaccctgcactgcaggccttctgcaacgcgggaggcgggaggggatttcgcgcgattcccgagggtgaggcaagaatatatgggagtgaacggaacggagcgtcactgtgggagcgggatgggaacggaacggctccgttccgttgattttttggagcggaatggttccggatctgagtagaatattccctaattggagtaatgccgttgtagttactttgtaaccaaacagcaacaaaactggaacagaacggcttcgttctacttggctcttcaaccaaacactatcttactgcttgctttcgctttcccttccttcctagtagcaggcagcagtagttcctacttcctagcaggcagcagcagcagctatttatgcagcagcagtgtgagacgacacattgaaaagcatctgatcctaaaggcgagccaacagcaaagagacgagacgagccccgggcggcccctacgttcctagtacaacatcagagaagtgtgtgatggttgctggtggtggtgtcagatcagcaagcaccaggtcttcagtctcctgctccatcaggaggtagaggtagctcgctcgctaggagctagctgcggaggaaagcgtcgaccttggcgttggtgctgcgggacaggaacttcatgcagatggacggccggcttggcgccggcgagggccaacacagactgcggcagcgtccagatgccgtcgccgcagatgaggcccgacgcgacggggggcgcgaatgccttggcccgggccgggtccaggcggtcccacacgaggcgcaccaggctgccgaagtaggggccgaggtaaaaggggatggacatggccatggtccatggacagcgggatgtaggcggcggcgcgggcgcgcgcgaggtcgcgtgccatgttgatggcgatggcggcggcttagaatgcgatgcagaggtcgagtcagtagcggggcagggttactcggaccccagcatgccgatgtcgcggaacgcgctgtagaagagccagaacacggacggcgccaccacgcagcccatggccgtgccgatcacctggctcacgaacatggaccgcggcgacgccagcgtcatgtacccggtcttgaagtcctgcgtcaggtccgacgccgtcgacacgatgccgatcatcacgctgcacacgccgccagacccgcgatgatgccgccgccgccgtctccgtcgtcggaggccgccgcccagccgcctaccgtcaagatggtcagcttgccgtacgtcgtggccagggaccggtccgtgagcccgtacgtacgcgttgcagaaggccagca

SEQ ID NO: 2494 - DNA, 229 bp, Zea mays
ctttccacaggctttcttgaactgtgaactcgtgggcgtggtggtggtggtgctggtgctgggtgtgtgggacggaatgattggctcctcccagtcccagtcccagtcccacccaccaattctcttccccccgaccggccgtgaattgaattgaatcgaatcgcatcgctgagcttccccccggctcgctcacgcgacctgttgatggttcaagaaagcccatggaaac

SEQ ID NO: 2495 - DNA, 1948 bp, Zea mays
cgtgaagccatgcagctttccccgaggctcctgcgcgtcctcgccatcctcctcgctgccctgcccccgcgctgctgcgcgggccaccacgcggactcgtcgtccaccgtcgccggcgacaggccgtccccgccgtgctcgccggcggaccgggcggcgctgctgggcttcaaggcgggcgtggccgtggacacgacgggcatcctggccacgtgggcgggtggcgactgctgtggcgcgtgggagggagtgacctgcgacgccgccacggggcgggtcgtggcgctgcagctggaggcgccgaaggcggaggtggggcgccactacatgcagggcgtgctgtcggcgtccctcggcgggctcgagttcctggaggcgctggtggtccgcgacatggccaggatcgcgggcgccatcccggcggcgctggcgcggctgacgcggctcaggcagctctacctcgagggcaacatgctgtccggggccatcccgaggagcctggccttgctgcggtcgctccagtacctgtcgctcgcgggcaaccggctggacgggcagctgccgccggagctcggtgccgtctccggcctggagcagatcaacgtcgcccggaaccgcctatccggcgcggtgcctccaagctacgagaacctgtcgaggctggcgtaccttgatctcggcagcaacctcttctccggcgcagtgcccgggtttcttggccagctcaagaacatggccttggtggacctcagcaacaacagcttctccggcgagattccggcctcgctctgcaccctgcgcagcctgacggatctgtcgctgagccataacaagctcggcggacagattccgacccagatgggcaccctccggtctctcaactctctggccatggacggcaacatgcttgtaggccccattccggcatcactcctcggcctgcagaagctgtggtacctaaacctgtcaggaaacgggctctctggtccactccccaccggcgccggcatcgctttgccttccatggtatccatggacctctcccgcaaccgtctcaccggcgacattggccagctgttgagaagcttgtcggtgaacaggacaagcccacagattgttcttgcccagaagctagagcacctggacgtctcggagaacaagatcgccggcgcgctgcccgacttggcccgcggcgcagggctcaggtggcttgacatctcgggcaacgccatcggcggccagataccgagctccatctccaagctgagcggcctcgagaggctggacatgtccaggaaccgcgtcaggggcaccatccctgcgtccatggcggagatggtgcgcctgcggtggctggacttgtccaggaacgagctcgtcgggaggatacctgacaacttcacgagactgacgggcgtgcggcacgccagctttagaggcaacaagctgtgcggccagataccacaggccaggccgttcaacctgttccgtgcggccgcgtacgcgcacaacctgtgcctctgcggcaagccgttgccggcgtgcaggaagatatggtgacacgggatcgcaagatgcaaggtgaggagccaagaagaacttgagcccactgctgctgcagtctgcaaagggtaatttagtttagggtagtagagtgcctttgtgtgtatcttccatgcgaaattaaattcagttctgtgtgagtaacaaaatacccccccccccccctgttcttcccctatctcacatactctcccagtataatctctctctttaggctttgtttggatactacctcaatcaatgtggattaaggtgagtacttagagtattcaaacacaaggttttagcatcaagcaccaaacctaaagatgtataagcggcaaggagatgtatgtgtcggctactgagacatgagtgttgagctccaactactatacataaggtg

SEQ ID NO: 2496 - protein, 454 aa, Zea mays
MGKKRKLEPKSAAGFTPVKASPTTRSATAKAAGLSEVLAPVEATMEKLPQGAGGEDVEEIEEVEVEEEVEVEEEEEGESDQASIQALLDSFPKDQLVELLRDAAIAHGDVLTTIRRVADADPAQRKIFVHGLGWDTTTDTLTEAFGPYGEIEDLKVVTDRNTGKCKGYGFILFRHRSGARAALREPQKKIGNRSTACQLASVGPVPGGAPNSAAPAPVQLQLPPVSEYTQRKIFVSNVGADIDPQKLLQFFARFGEIEEGPLGLDKVTGKPKGFALFVYKTIESAKKALEEPHKHFEGVMLHCQKAIDGPKPNKLGGAGGFFGAGASSGGKGFAGYGATSHSLPGTVGIVQPMSPLAPGLASLPGGISAAPGVDPALGQALTALLATQQGGGLSFNSILGVGANGSGLPPQGPTGALGGSSVQGMQGGYMGGYGGSGGYGGASSGGPGRHYMGH

SEQ ID NO: 2497 - protein, 408 aa, Zea mays
MASAPGEVPSHFLCPISLQLMREPVTLPTGISYDRAAISRWLATPAPAGGRTCPVTRVPLPPQPQLTPNHTLRRLIHAWLASLSPEAEVNEDVAALRGPVPGAEVVVALLSDAAGAQVEALKRLRELVAECEDSRAVLESQDGVFDALSRVVSSADACSTAREEAVGLLASLRIPEPELAGVVARHSNLGDALTAVLRSSNLKSRANAALLVRSLSEAAWPAWVIGLSQELLAEVVRVVRDRVSTQATKAALHALAALCPYGLTRVKIVGVGAVPAIVDLLLDDPERRVNELALVALDRLCTCAEGRAELVAHAAGLAVVGKKALRVSETASERAVRVLRSVARHAATPAVLQEMVESGVVAKLCAALWSQQCGLRTKQKAHEVLKLHSRTWRSSPCLSPKFLGLYPS

SEQ ID NO: 2498 - protein, 178 aa, Zea mays
MATTHDDCVSLCLMALAAAGGGGMTTQSYAPSTAAWTTQECELRFRCSVCGKAFASHQALGGHKASHRKPTHLQTQQASSSSVTTSSAGSGGGQGRHRCSVCHRSFATGQALGGHKRCHYWDGLSVSLTASGSGSTVKGFDLNLMPATRWGEEEEVQSPLPIKKRRLSGPSLDLSLTI

SEQ ID NO: 2499 - protein, 1649 aa, Zea mays
METPSEALKPAEAKPAKPRPVAPTGRFALGTASSIKKRADGSAPAEVGVPRSSLMKSTSSLNASSATRRSSTGTAGKQQDNGSSAAAKKSSPTLSDGARKTKLVSAPAAGSKPAVEKKTSLVERTGADLARKPAVKASPTSTLKKVQSKTESSNGSSGSTRRVSSNASVPSPRSVTSNAARKLGTQASSAASNRRKSSTADSRDSRFMMLPQVDLKASDEVRLDSRGHRVRSLKQLRLSHALEFVYLRDNLLSSLEGIEILKGVKVLDLSFNDFKLPGFEPLGNCVVLQQLYLAGNQITSLASLPELPNLEFLSIAQNRLKSVCMARQPRLQVLAASRNKISTLKGFPHFPSLEHLRVEENPLLEMPHLEAASILLIGPTLKKFNDRDLNPNEAEVAKQYPAHTAICIRDGWEFCSPELAADSTFSFLLEQWNNKLPQGYMVNKAYVDHPFEEDPCHCHFRFTNLGGEGELVLKYQWFLGGKTPTDFVAIPGASSEVYWPKREDVGRCLKVECTPIVNGAEFSPVFAVSLPVSPGTGCPKVINLAVSGEVVEGNILSGVPEIAWCGGTPGKGVASWLRRRWNGNAVVIDGAEGMEYQLTVNDINSSLVFMYTPVTDEGVKGEPQCTMTDFVKAATPSVSNVHVLGDIVEDNIIVGKGKYFGGREGLSKIRWFREKENGEFLLVLSDSMEYTLTKEDVGRHLKFVYIPVNLEGQEGESACAITDVVKKAPPKVFNLKIVGESMEGSKISASATVTGGTEGSSRVQWYKASSSEFKNEHELEALTPSRVSKTFRIPLGAVGYYIVAKFTPVAPDGEVGEPAYATSDGLVETLPPSLNFLTVTGEFSEGQILTASYGYIGGHEGNSLYSWHLHEAEDDEGTPLSEATGLLQYCVTKEAVGKFVSFKCTPVRDDDIVGEARSFIGKDRVTPGMPTLLSLEVTGDAIEGTTMFASKRYWGGEEGDTMFRWILTNSDGTEKEIEGATSSSYTLKCNDIGFYISVLCKPVRNDGVDGSLVSTEAIGPIIPGPPTCQSLELAGSMVEGGRLTFHAVYTGGLRGSCIQEWFRLHDDGHKDKLTADECLDLDLADIDCRIELMYTPVREDGVHGLPRSVTSDTILPGEPKGVNLILPECFEDNEISPIKTYFGGKEGTGKYTWFRNKEKLDNLEFDLVAESSEVVGETLKYKPSLNDVSSYLILYWVPTRRDGKVGDPLMAISDDPVMAAFPSVSDVHLEQKSSDVYCGLGIYYGGYEGLSLYRWYRESSDGTRLHIDGADSVTYEVTDADYSCRLLFGYTPVRSDGISGEEKLSEPSDVILPELLKIETLNFKGNQVERETLTAAEQIPYSEIQQHIWKNYKKEMKYQWFISNESGGDQSFEPLATQCSRSYKVRFEDIGRCLKCECFVTDVFGRSSELVSAVTAPILPGRPKIEKLEIEGRGFHTDLYAVQGTYSGGKEGKSKIQWLRSMVGSPDLISIPGETGRTYEANVDDVGYRLVAIYTPVREDGVEGQPVSVSTEQIAVEPELYREVKQKLDDGSVKFEVLCDKDRTPKKAQVMGHLERRVLEVNRKRIKVVKPGSKTSFPSTEVRGTYAPPFHVELYRNDQHRFKIVVDGDTEVDLMVQTRHMRDRIILTIRGLAQKFNSTSLNTLLRIES

SEQ ID NO: 2500 - protein, 726 aa, Zea mays
MDGRKRKGKFRNSLRRMAMECLCSGEQLKASDETMRSSDSTITKDFSASGYSSRNGEIEQYLDNGNIEEAELSLREGICLNYEEARALLGRLEYQRGHVEAALRVFDGIDISALVPKMKISIARKTDRRKTHSQWDSPPMPLHAVSLLMEAIYLKARALHDLGKDKEAAQECRMILDIVEAAVPEGLPAGFGKGCKLNEIICKAVELLPELWKSGGFSLETISSYRRSLLNNWNLDGETIARIQKKFAVFLLYSGCEARPPNLHSQLDGSFVPRNNIEEAILLLMILLRKSNLKRIEQDPSVMHHLTFALSMSGQLIPLAGQFEELLPGVLDKKEWLYSVALCYLAEEDDLSALNLLKIILKSGEDSVQLIELLLASKACIEMSIHTEGAFYARRAIANMQGGCKPMAGLANLLLGVALSNQARSAISDTDRASWQCEALEALGNAEKNIHGKDSRALYSLSLENAVQRKLELAAFYAKRLVKLEAGSELRSWLLLARILSAQKLFADAETVVDAALDQTGKWCQGDLLRTKARIQAAQGQFREAVETYTQLLAIIQLRTKSLTAGVCLPKGNKDDKGLETETWYDLALLYLGMAQWRDAEVCVLKIRSISPYSALAWHATGKIYEAKGLRKEALGAFFRALDLDPKHVPSLISTATVLQQLGDRPLPSIRCFLTDALQLDRTNHVAWFNLGLLYKEEGGRSAAEAAECFQAAAFLKETAPSEPFR

SEQ ID NO: 2501 - protein, 667 aa, Zea mays
MSAARRCGGVRRRLDRAAAGDNANGYVETDPTGRYGRFDELLGKGAMKSVYRGFDEERGVEVAWNQASLADVLRSPDAVQRMYSEVQLLSELRHDGIIGFHASWVDVPGRSFNFITELFSSGTLRSYRLRYPRVNLRAVRSWARQLLGGLAYLHARDPPVIHRDLKCDNIFVNGHQGHVKIGDLGLAAVLRRGGAAHSVIGTPEFMAPEMYDEEYDERVDVYAFGMCMLEMLTVEYPYSECTNPAQIYKKVTAGRLPDAFYRVDDDDARRFIGRCLVPAANRPSAAELLLDPFLLHHHHHAAAAAGTVPVPSPLPTTAVAAGAPPPSTCSSSAADDDVVSALDDDDEVDVPPRNDMTITGKLNAEEDTIFLKVQIADEASGHARNIYFPFDMASDTAAEVAQEMVKELDITDRHASEIAAMIQQEIGRLLPGRAQQHEYTYASRGGDYDDEERPPPFYYLSSSPASSHGSHCGVGPYAFGGFSGPCGSAWTKDHDWYALSDNDDDMSSVHSGKYSPVHYASGAGHEEAPASSSGSSKTRFGGGGSGSAAALARQLERQCSVSPQHAGRPRRREDDDDRAGRRRRMTRNRSMVDMRSQLLHRTLVEELNRRLFFNTVGAVENIGFRAPTTTAASSSSSARGGLDRGRRPGGGGKQRQLDDKEQQYFML

SEQ ID NO: 2502 - protein, 714 aa, Zea mays
MAAAEWDSRSVASPTGDWPPAAAASPIKGKAALPESDGGASASGSSEAKVDDGNIQEAESSLREGLSLNYEEARALLGRLEYQRGNVEAALRVFDGIDLQAAIQRFQPSLSDKPLSKRSNKLRADSSNSGSQHAASLVLEAIYLKSMSLQKLGKAMEAAKQCKSVLDAVESIFQCGIPGVMVEQKLQETVSKSVELLPELWKQAGAYQEALASYRRALLSQWNLDDECCTRIQKRFAVFLLYGGVEAAPPSLASQTEGSFVPRNNLEEAILLLMILLKKWFLGKTHWDPSVMEHLTFALSLCGQTSIIAKHLEEVLPGIYPRTERWYSLALCYFAVSHNEAALNLLRKSLNKNESPNDIMALLLAAKICSSNNLLSSEGVEYAKRAVRDAESSDGHLKSVALHVLGSCLSRKSKVASSDHQRSVLQAEALKSLNEAISLDRHNPELLFELGIEYAEQRNMHAALKCAKEFIDVTGGSVSKGWRLLLLVLSAQQRYSEAEVVTDAALDETAKWEQGPLLRIRAKLKVAQALPMEAVEAYRTLLALVQAQRKAYGSVKNGTEDNEDKVREVEVWHGLANLYSSLSYWRDAEICLQKAKALKTYSATTLHVEGNKHELHEKIQDAVAAYFNAISMEVEHVPSKVSIGALLSKQGPKFLPVARCFLSDALRLEPTNRMAWFYLGEVHKQDGRLADAADCFQAASMLEDSDPVESFRSL

SEQ ID NO: 2503 - protein, 700 aa, Zea mays
MDCDLFAAWWSSSTRLVSRIFRGSADAPGPSPARPAMPLHQKQAGLAASKLGVGTSKKHRAFVASDEQWYNKIFDPSSDFILTWNRIFLFSCFVALFIDPLYFYVPKISYGSPKFCIGTDTRFAVGVTFFRSIADLLYVLHIIIKFRTAYINPSSTLRVFGRGDLVTNPKEIAWKYIRSDLAVDVAAALPLPQIIVWFVIPAIKYSSAEHNNNILVLIVLAQYLPRLYLIFPLTYEIVKATGVVAKTAWEGAAYNMVLYLIASHVLGALWYLLSVDRQTFCWKTNCLNETGCDLKYLDCDTTPNATWANTTAVFSNCNASDTNISFDFGMFEPALSNQAPAQSFAMKYFYSLWWGLQNLSCYGQTLTVSTYLGETLYCIFLAVLGLVLFAHLIGNVQTYLQSITVRVEEWRLKQRDTEEWMRHRQLPCELRERVRRFIQYKWLATRGVNEESILHALPADLRRDIKRHLCLGLVRRVPFFSQMDDQLLDAICERLVSSLCTKGTYIVREGDPVTEMLFIIRGKLESSTTNGGRTGFFNSITLKPGDFCGEELLGWALVPRPTTNLPSSTRTVKALIEVEAFALQAEDLKFVASQFRRLHSKKLQHTFRYYSHHWRTWASCFIQAAWRRYKRRKMAKDLSMRESFNSVRLDEVDNEDDDSPPKNSLALKFIARTRKVPQNMKELPKITKPDEPDFSAEPED

SEQ ID NO: 2504 - protein, 595 aa, Zea mays
MGERRRFPASARLLALAVAMVLQAAAVVLVLGEASDGGAMLVGPRQLEKFVDELPDMPRLRGYGVTEGGALVAGNLTIGMYDTSWKFHRDLPATRVFAYGTSKETATVPGPTIEAMRGVPTHVTWANHLPARHFLPWDPTLTTAVAPGGRGVPTVVHLHGGVQQSSSDGHSLAWFTSGFAATGPRFSPPPYTYPNRQPPGNLWYHDHAMGLTRVNILAGLMGAYRVASPAEEGPMNLPRGEAFDRNLVLFDRDFRAADGALFMNRTGNNPGVHPQWNPEYFGAVVVVNGKAWPYLRVRRRRYRFRILNASNARFFRLSLSAGLRFVHVASDSVYLARPVATERFVVAPSEIADVVVDFAESAAGAAVVLSDDAPAPYPGDPGEKAETIAVMKFVVEGAAEDPDTSTVPATLMPHYPRPDAREAATARHITMYEYTRAGTDEPTHLYLNARSYMDPVTETPKEGTSEVWEVINLTDDNHPLHVHLAVFAVLEQRSLRRVDEFRDCMKRRNDARACGVDRHLAGGRRHVVPRQERGWKNVFKVRPSAVTRILVRFKPLTDAASPEESRFPFDVTTGPGYVYHCHVSTARICLSRSFV

SEQ ID NO: 2505 - protein, 604 aa, Zea mays
MQGLAPPTSVSIHRHLPARSRARASNSVRFSPRAVSSVPPAECLQAPFHKPVADLPAPSRKPAAIAVPGHSAAPRKADGGKKQLNLFQRAAAAALDAFEEGFVANVLERPHGLPSTADPAVQIAGNFAPVGESPPVHELPVSGRIPPFIDGVYARNGANPCFDPVAGHHLFDGDGMVHALRIRNGAAESYACRFTETARLRQERAIGRPVFPKAIGELHGHSGIARLALFYARAACGLVDPSAGTGVANAGLVYFNGRLLAMSEDDLPYHVRVADDGDLETVGRYDFDGQLGCAMIAHPKLDPATGELHALSYDVIKRPYLKYFYFRPDGTKSDDVEIPLEQPTMIHDFAITENFVVVPDHQVVFKLQEMLRGGSPVVLDKEKTSRFGVLPKHAADASEMAWVDVPDCFCFHLWNAWEDEATGEVVVIGSCMTPADSIFNESDERLESVLTEIRLDARTGRSTRRAVLPPSQQVNLEVGMVNRNLLGRETRYAYLAVAEPWPKVSGFAKVDLSTGELTKFEYGEGRFGGEPCFVPMDPAAAHPRGEDDGYVLTFVHDERAGTSELLVVNAADMRLEATVQLPSRVPFGFHGTFITGQELEAQAA

SEQ ID NO: 2506 - protein, 295 aa, Zea mays
MSGAGPDLQLPPGFRFHPTDEELVMHYLCRRCAGLPIAVPIIAEIDLYKFDPWQLPRMALYGEKEWYFFSPRDRKYPNGSRPNRAAGAGYWKATGADKPVGTPKPLAIKKALVFYAGKAPKGEKTNWIMHEYRLADVDRSARKKNSLRLDDWVLCRIYNKKGGGLEKAAAPAAGGDHKPVFATAAVSSPPEQKPFVAAAGGLPPAFPELAAYYDRPSDSMPRLHADYSSCSEQVLSPEQLACDREVQSQPKISEWERTFASDPVNPAGSMLDPVVGHAGGDPLLQDILMYWGKPF

SEQ ID NO: 2507 - protein, 330 aa, Zea mays
MAVEAHSLLLAGGHKQLTSAGWPWTTGDEARCATARPSHQQAFQLQQASCVGVGVGLPAAAPVSSAAAAPPAPMIAQQYAAGGRLFVGDAAESGVTFGGGGAVQQEAPRKRKRAEQGQTPPPVLGTGAADVAAQFQQQLVDVDRLVLQHTAKMWAGLTEQRRRHARQVVATVEAAAAPRLRAKEEEIRRMRRVNWALEERVKSMYVEAHMWRDLAQSNDAAVTALRGELQQALDAQQTRRRADDADSCCCGENDVFITGAGAAENEEEAGTGTSSSGHVRGACAVCGDNAADVLLLPCRHLCACAPCAAAARACPACGCAKNGSVCVNFS

SEQ ID NO: 2508 - protein, 135 aa, Zea mays
MRKHRIVSLVAALLVLLALAAVSSTRSAQKESAADNAGMLAGGIKDVPANENDLQLQELARFAVNEHNQKANALLGFEKLVKAKTQVVAGTMYYLTIEVKDGEVNKLYEAKVWEKPWENFKQLQEFKPVEEGASA

SEQ ID NO: 2509 - protein, 250 aa, Zea mays
MPINRIALGSHQEVYHPGALKAAFAEFISTLIFVFAGQGSGMAFSKLTGGGPTTPAGLIAAAVAHAFALFVAVSVGANISGGHVNPAVTFGAFVGGNITLFRGLLYWVAQLLGSTVACFLLRFSTGGQATGTFGLTGVSVWEALVLEIVMTFGLVYTVYATAVDPKKGSLGTIAPIAIGFIVGANILVGGAFDGASMNPAVSFGPALVSWEWGYQWVYWVGPLIGGGLAGVIYELLFISHTHEQLPSTDY

SEQ ID NO: 2510 - protein, 664 aa, Zea mays
MPLQVHPLLLLLLVSSLPSCAISSGSSSCAGRDDAAIVAAAFRHVRNFRAPRTKACQPVRALRLPSRNLTGAVSWAALANLSALAAVDLSGNALQGAIPGGFWRAPSLRAVDVSRNQLGGALRVEPNPQLQSLNVSGNRFTGVDGVEGLSGLVALDVSTNRIRAVPRGLRRLTRLKRLDLSSNGMRGWFPGDLPPLGGVRSLNVSYNKFSGVVDTGAVTKFGHSAFVHAGNASLVFSGHSTEPRRPRPSPPHGKSKKNGGSAGTSTESKATRSSKKRKHLSIVAVAVICGVVSLAMLLCLVGCVACGVLKSRQKGGKDDDEKKPQWGEKGEEEKEEDVVVAAARGASAAPVVLFERPLMQLTLANLAAATSGFGRESQLAERGGRSGAAYRAVLPGDQHVVVRVVEGAMAGLGEDDNPAAAATAFRELARLRHPNILPLLGYCIAGKEKLLLYEYMEKGDLHRWLHELPAGRPDMDDTGSGDIWEAAEVKRSISDWPTRHRIALGVARGLAFLHQGWAGGSGRAAVVHGHLVPTNVLLCDDLEPRISDFGHNNDPPSAATPEGDVYGFGVLVLELMTGQAGWDEASVSWARGIIRDGKGLDIVDPRVRDEAAGAEAEAEREMVECLRVGYLCTAHAPDKRPTMQQVVGVLKDIRPAPPTPGPGS

SEQ ID NO: 2511 - protein, 484 aa, Zea mays
MEDVVAVVASLSAPPAPAFSPAAAGLTLIAAAVADPIAAVVVGAMEGVSVPVTVPPVRTASAVDDDALAPGEEGGDASLAGSPCSVVSDCSSVASADFEGVGLCFFGAAAGAEGGPMVLEDSTASAATVEAEARVAAGGRSVFAVDCVPLWGYTSICGRRPEMEDAVAIVPRFFDLPLWLLTGNAMVDGLDPMTFRLPAHFFGVYDGHGGAQVANYCRERLHVALLEQLSRIEETACAANLGDMEFKKQWEKVFVDSYARVDDEVGGNTMRGGGEEAGTSDAAMTLVPEPVAPETVGSTAVVAVICSSHIIVSNCGDSRAVLCRGKQPVPLSVDHKPNREDEYARIEAEGGKVIQWNGYRVFGVLAMSRSIGDRYLKPWIIPVPEVTIVPRAKDDECLILASDGLWDVMSNEEVCEIARKRILLWHKKNSTSSSSAPRVGDSADSAAQAAAECLSKLALQKGSKDNITVVVVDLKAQRKFKSKT

SEQ ID NO: 2512 - protein, 292 aa, Zea mays
MLLNPACEAAAPMDSIRHHLLDEPAAAATASAAPRPVYCRSTSFGSLVADQWSESLPFRPDDADDMVVFGALRDAFSQGWLPDGSFAAVKPEPLAFPDSPYERGSYPCLGGFLLAEGPETPTEAATTPGSEEEAAAAVSRGKHYRGVRQRPWGKFAAEIRDPAKNGARVWLGTYDSAEDAAVAYDRAAYRMRGSRALLNFPLRIGSEIAAAAAGDKRPLALPEPATSSDSSSSSSSTGGSPKRRKRGEAAAANMAMALVPPPSQLSRPAQPWFPAAPVEQAAMPPRVEQLVI

SEQ ID NO: 2513 - protein, 128 aa, Zea mays
MATRAPPQSSSTGSVTVTIDPSPSSSSSSAPPASAPAPAPAPESVVLRLKRRAKKKVSWKEGTVDNEGLGRKSSKKCCIFHKEVPFDEDCSDDEAPGGGGGHRCPRPHGDAGEGTSGCSSSSHDHGHH

SEQ ID NO: 2514 - protein, 634 aa, Zea mays
MDGCDCIEPLWPTDDLLVKYQYISDFFIALAYFSIPLELIYFVKKSSFFPYRWVLIQFGAFIVLCGATHLINLWTFTTHTKTVAMVMTIAKISTAVVSCATALMLVHIIPDLLSVKTRELFLKNKAEELDREMGLIRTQEETGRHVRMLTHEIRSTLDRHTILKTTLVELGRTLGLEECALWMPSRSGSSLQLSHTLRHQITVGSSVPMNLPVVNQVFSSNRAIIIPHTSSLARVRPLAGRYVPPEVAAVRVPLLHLSNFQINDWPELSAKSFAIMVLMLPSDSARKWHVHELELVEVVADQVAVALSHAAILEESMRARDLLMEQNVALDLARREAEMAIRARNDFLAVMNHEMRTPMNAIIALSSLLLETELTPEQRLMVETVLKSSNLLATLINDVLDLSKLEDGSLELEIKAFNLHAVFKEVMGFIKPIASIKRLSVSVMLAPDLPLCAIGDEKRLMQTILNISGNAVKFTKEGHITLVASIVKADSLREFRTPEFHPTASDEHFYLKVQVKDTGCGVSPQDLPHVFTKFAHPQSGGNRGFNGSGLGLAICKRFVSLMGGHIWIDSEGTGRGCTATFVIKLGVCDNTNTYQQQLVPLVWPSSADSNLSAPKVLPDGRGSVSLKSRYQRSV

SEQ ID NO: 2515 - protein, 255 aa, Zea mays
MLRLVPPPARHAHGHYHSHTQAAAMDAAGSFSDYSSGTPSPVAGGGGGDDFGSSSYMTVSSAPPKRRAGRTKFKETRHPVYKGVRRRNPGRWVCEVREPHGKQRIWLGTFETAEMAARAHDVAALALRGRAACLNFADSPRLLRVPPTGSGHDEIRRAAAVAADQFRPAPDQGNVAAEEEAADTPPPDALPSVTMQSVDDDPYCIIDDRLDFGMQGYLDMAQGMLIDPPPMAGSSTSGGGGDDDDDDGEVKLWSY

SEQ ID NO: 2516 - protein, 1273 aa, Zea mays
MDAPDVQQSMGYKESRGGMPKFFHALGPALLISMGYIDLGKWVAAVEAGSCFGFDLVLLALLFNFTAIVCQYLAACIGTVTGKNLAEICHQEYNQPTCIFLGVQAGLSLLTSELTMIFGIALGFNLLFEYDDLITGICFATVVPNLLPYAISHLGKKMEGTINACIAGFALLSYVLGLLVSQPQIPLTMNVIFPKISGESAYSLMALLGANIMAHNFYIHSSVVQGQKKSSAVGLGALFHDHLFSILFIFTGIFMVNYVLMNSAAAESTNTLLITFQDVVELMNQIFVNPLAPTIFLVVLLFSSHIISLTSAIGSQVISHHLFGINLPLSGHRLLLKVFAIVPTLYWAKVAGAEGIYQLLIICQIIQAMLLPSSVVPLFRVASSRSIMGAHRVSLHLEILVFLAFLLMLFSNIIFVAEMLFGDSGWMNNLKGYTGSPVVLPYTVLVLVALISVAFSLYLAVTPLRSGSHEAESHEWSVHSQRELLNTSQEREDVKVDNVTYEEDQRSDVVPSPRDVPDSHPELALDYIDTSDTAVESDHDSQQSTAYASTAPETCSSPSFTREESKSVVAVNWPEPLEKVPTSTVMEESTVENVVSRITTERDVLVETDVVSGKDKEDIRTLESEKSIVDSTPYVSDDGPPSLTFSRGKGSDAGNGSGSLSRLSGLGRAARRQLAATLDEFWGHLFDYHGKLTQEASTKKFGILLGIDLRTPSTSVRTDKQAAEILKSPLVRDSMRGAAFLSSSVDMMSPKNETSNLELAYGLQRGPGMGLSSWSQGMQLPNTQLQSSSNSLLEQSARLNSNFSSSYSDNNQFYQPATIHGYQLTSYLKQMNASPSLYSSMPLDPQRLPKSSVSAVPNYADSMMHARNHNLLASLGGTTTQLPATSRVGSMMPERSYYDPSSVDGNENAGSPAYSKKYHSSPDMSGIIAASRAALLNEAKLGAAIGPQSYLSRLAAERSQYASSTARPAAPLAFDELSPPKLQSDIFSAQSSMRPSARSLWAKQPFEQLFGMSSAELSKGDFNLPGRSGGVAKDDFSYKESETKLLQSLRLCIMKLLKLEGSGWLFKQNGGCDEDLIDRVAAAEKLLMQGTAENQLLLHGGDLQQHSSDQAGIQYMRTLPNCGEDCVWRASLVVSFGVWCVRRVLDMSLVESRPELWGKYTYVLNRLQGILDPAFSKPRGALTICTCLQKDTRVRNSPPHSGLTAMGPVPTPIRGAFTTAGVVLEMIKDVEAAVSGRKGRSGTAAGDVAFPKGKENLASVLKRYKRRLASKGQ

SEQ ID NO: 2517 - protein, 346 aa, Zea mays
MLQYHFGDLTTMSARANRKRRKEMGGGCPTSPCQPHSLHTTRGHEHHSCLSHGPRAAQHLHLSKWQPAAVPFLHPLPSSQSQPLTMAATLSSVAAPSLPKHIPVTRAQQQAPPSIISASTQKTAFHGVSLVVDRRWAAGHRRGGGRRRLLQVNARTAAKNIEVEVEKPLGLALGQKPGGGVVITSVESGGNAARAGLKTGDQVLYTSSFFGDELWPADKLGFTKTAIQAKSDSVYFVVSRGAEVDVKRLPKRPAPPRFGRKLTDSQKERATHVCLDCGYIYFLPKPFDEQPDDYGCPQCNAPKKRFARYDAATGKAIGGALPPIAVIVSLVIGIAGVGALLVYGLQ

SEQ ID NO: 2518 - protein, 511 aa, Zea mays
MATAIYLSSPAAPSSCARQRRQTTRATASATDRPREVVSPKRRLPLRKVPGDYGPPVLGAIRDRFEYFYGPGGRDGFFTSRVRAHGSTVVRLNMPPGPFVARDPRVVALLDAASFPVLFDTSLVDKTDLFTGTFMPSTELTGGYRVLSYLDPAEPNHGPLKTLLFYLLSHRRQHVIPKFREVYGDLFGLMENELARVGKADFGHYNDAAAFSFLCQALLGRDPAESALQGDGPKLITKWVLFQLSPLLSLGLPKHVEDSLLHSFRLPPALVKKDYDRLADFFRDAARRVVDEGERLGVAREEAVHNILFAMCFNSFGGMKILFPSLVKWLGRAGGRAHGRLATEVRDAVRAHGGEVTMKALAEMPLVKSAVYEALRIEPPVAMQYGRAKQDMVVESHDYGFEVREGEMLFGYQPMATKDPRVFARAEEYVPDRFLGEDGAQLLRHVVWSNGPETASPTLQDKQCAGKDFVVLIARLLVAELFLRYDSFDVQVGASALGSSVTITSLKKATF

SEQ ID NO: 2519 - protein, 261 aa, Zea mays
MVMPATVAQYLKIIQNPTYAELQMAANQGRRCTWEKLSAIRANCAIELVLDESIAVLNHKRRLKRSMEMTAAASQVHSNYVRLKTPRRIPSWSCISRENSSESLSEEIVSTPTLAHHAQRNSYDGSKSESETIDLNSWTRSGGPLMRTSSADKFISFIHNLEIDTELTRACTVEGNAAGIWSEPTFPSDPPPNNSSSVTMPGRCTENSETEACNTANTRASQASTPTSMAVCEGDLLQPESTSNGILLNIVKRKGMPYGLV

SEQ ID NO: 2520 - protein, 452 aa, Zea mays
MTSAGVNVPGDDGVGNPAAASGSASAPECRTMQRRRRRLEPQGSGDAAAGPSWVRRLRPAASRFSPSPSQGSADRPNDEEQEEDDPDVQEMELVPLPPAGPQELQPADVPAQVWPVAFGSLSMAGRMRMMEDTISLHPDLCTWADGSPVHFFAVFDGHGGSHVSALCRDRMHEFVAEELGKEGAAFLRRRQEWLAWGDGAGAETSAAAFVRGPRGAWPEREEEERAWRSALRRSFRRADAMAALACACGRVARPSCRCPLSSVVSGIVGSTAVVALLVRGRLVVANCGDSRAVLCRGPAGTPPVPLSSDHKPNRPDERARIEAAGGLVVFNNGHRVRGILAMSRALGDRLLRPEVIAEPEITVTERTAEDECMILATDGMWDVIANDVACNVARHCLEDGNPPPAATAAAATAGREEEPRCVRATSLLARLAIGRETLDNVSIIVVDLKHRE

SEQ ID NO: 2521 - protein, 513 aa, Zea mays
MAMATALRKLSANALRRQPLSRITPLYYMASLPATEERSGITWTKQLNAPLEEVDPEIADIIEHEKARQWKGLELIPSENFTSVSVMQAVGSVMTNKYSEGYPGARYYGGNEFIDMAESLCQKRALEAFRLDPAKWGVNVQPLSGSPANFHVYTALLKPHERIMALDLPHGGHLSHGYQTDTKKISATSIFFETMPYRLDESTGLIDYDQLEKSAVLFRPKLIIAGASAYARLYDYDRMRKICNKQKAILLADMAHISGLVAAGVVPSPFDYADVVTTTTHKSLRGPRGAMIFYRKGVKEINKQGKEVMYDFEDKINAAVFPGLQGGPHNHTITGLAVALKQATTPEYRAYQEQVISNCAKFAQSLISKGYELVSGGTDNHLVLVNLKNKGIDGSRVEKVLESVHIAANKNTVPGDVSAMVPGGIRMGTPALTSRGFVEEDFAKVADFFDAAVNLALKIKAATTGGTKLKDFVATLQSDSIQVEIAKLRHDVEEFAKQFPTIGFEKETMKYKN

SEQ ID NO: 2522 - protein, 817 aa, Zea mays
MSSSSAASIGQPPPPAPPPEEEKKCLNSELWHACAGPLVCLPTVGTRVVYFPQGHSEQVAASTNKEVDGHIPNYPNLPPQLICQLHDVTMHADVETDEVYAQMTLQPLNPQEQNDAYLPAEMGIMSKQPTNYFCKTLTASDTSTHGGFSVPRRAAERVFPPLDFTQQPPAQELIARDIHDVEWKFRHIFRGQPKRHLLTTGWSVFVSAKRLVAGDSVLFIWNEKNQLLLGIRHATRPQTVMPSSVLSSDSMHIGLLAAAAHAAATNSRFTIFYNPRASPTEFVIPLSKYIKAVFHTRISVGMRFRMLFETEESSVRRYMGTITEVSDADPVRWPSSYWRSVKVGWDESTAGERPPRVSLWEIEPLTTFPMYPSLFPLRVKHPWYSGLAALHDDSNALMWLRGVTGEGGFHSLNFQSPGIGSWGQQRLHPSLLSNDHDQYQAVVAAAAASQSGGYLKQQFLHLQQPMQSPQEQCNLNPLLQQQILQQASQQQMVSSDAQNIQSVLNPGAIQQQLHQLQQMQHTHNDQKQKIQPDQQYQVASSAVLPSPTSLPSHLREKFGFSDPNVNSSSFISSSSNENMLESNFLQVSSKSVDLSRFNQPVVSEQQQPQQQQAWKQKFMGSQSMSFGGSVSLNSPTSKDGSVDNKVGRDVQNQSLFSPQVDSSSLLYNMVPNLTSNVADNNISAFPSGSTYLQSPMYGCLDDSSGLLQNTGENDPTTRTFVKVYKSGSVGRSLDITRFSNYAELREELGQMFGIKGQLDDPDRSGWQLVFVDRENDVLLLGDDPWESFVNSVWYIKILSPEDVHKMGKPGNDPRYLS

SEQ ID NO: 2523 - protein, 362 aa, Zea mays
MDRAALTVGPGMDMPIMHDGDRYELVRDIGSGNFGVARLMRNRADGQLVAVKYIERGEKIDENVQREIINHRSLRHPNIIRFKEVILTPTHLAIVMEYASGGELFERICNAGRFSEDEARFFFQQLISGVSYCHSMQVCHRDLKLENTLLDGSTAPRLKICDFGYSKSSVLHSQPKSTVGTPAYIAPEVLLKKEYDGKVADVWSCGVTLYVMLVGAYPFEDPDEPKNFRKTIQRILGVQYSIPDYVHISPECQNLVSRIFVADPATRITIPEIRNHPWFLKNLPADLMDDSTMSKQYEEPEQPMQSMDEIMQILAEATIPAAGPHGLNQFLNDGLDLDDDMDDLDSDTDLDLESSGEIVYAI

SEQ ID NO: 2524 - protein, 663 aa, Zea mays
MDRARGSAFLLGVLLAGSLFAFSVAKEETKKLGTVIGIDLGTTYSCVGVYKNGHVEIIANDQGNRITPSWVAFTDSERLIGEAAKNQAAVNPERTIFDVKRLIGRKFADKEVQRDMKLVPYKIINKDGKPYIQVKIKDGENKVFSPEEISAMILGKMKDTAEAYLGKKINDAVVTVPAYFNDAQRQATKDAGVIAGLNVARIINEPTAAAIAYGLDKKGGEKNILVFDLGGGTFDVSILTIDNGVFEVLATNGDTHLGGEDFDQRIMEYFIKLIKKKYSKDISKDNRALGKLRREAERAKRALSNQHQVRVEIESLFDGTDFSEPLTRARFEELNNDLFRKTMGPVKKAMEDAGLEKSQIHEIVLVGGSTRIPKVQQLLRDYFDGKEPNKGVNPDEAVAFGAAVQGSILSGEGGDETKDILLLDVAPLTLGIETVGGVMTKLIPRNTVIPTKKSQVFTTYQDQQTTVSIQVFEGERSMTKDCRLLGKFDLNGIAPAPRGTPQIEVTFEVDANGILNVKAEDKGTGKSEKITITNEKGRLSQEEIDRMVREAEEFAEEDKKVKERIDARNQLETYVYNMKNTVGDKDKLADKLEAEEKEKVEEALKEALEWLDDNQSAEKEDYEEKLKEVEAVCNPIVSAVYQRSGGAPGGDADGGVDDDHDEL

SEQ ID NO: 2525 - protein, 232 aa, Zea mays
MAPCASPSALALSASTRVSILRLPLALRQRAEARVPGAQFRPSTACSWARPLLPELAGAVPRAGARGTGRRTQPLFRPRALTTTSQIASCAFTLGTVAVLPFYTLMVVAPNADITKRTVESGAPYVALGLLYAYLLYLSWTPDTLRAMFASKYWLPELAGIVRMFASEMTVASAWIHLLAVDLFAARQVYHDGLRNNVETRHSVSLCLLFCPVGILAHVLTKVLAGAVARSH

SEQ ID NO: 2526 - protein, 404 aa, Zea mays
MPAADPPVTDAVPDEDAAPRPSPPPPPPRPRPLSLASALPFWFYFAAAVSLLALLLPHLLPPSSPAPLPPLLLGHLAAGRFLKLDPAPGLFAVTSRPTAAAGDSPAHRVLVLPGLAAGSLSFRRVLSSLSSRGVHAAALDLPGQGLSPASPAATAPARTSALREIMNRGVFHAFEHLVQTGEVPYQEEEPAASAARSPHAPDEAAAAVARAAEALGVGPVHLVLHDSALAAGAAFASANPGAVRSVTLVDATASLPAFPAAVFDVPVLGRLVLRVPALFRGLVRLCCVRGVGAEEAEAYRAAMRGEGKAEAVVEAWKSMNHSFQLGEWRVSSEEVRRLPMLVLWSGSWSDMWIDEGKKVAAALPDAKFIYHSGGRWPQVDAFEEISGVITEFVTSAEEAGSSRW

SEQ ID NO: 2527 - protein, 597 aa, Zea mays
MSPTMASSLCVFAAMSGASGRPSAGGSAVPGRLSSSTQGGKGKRAVVQPLAASVVTETPAPAVAPARPVVDAPPRRRGGRGTVEHAAWKSVRQERWEGALELEGELPLWLDGTYLRNGPGLWNLGDYGFRHLFDGYATLVRVSFRDGQAVGAHRQIESEAYKAARAHGKVCYREFSEVPKAEGFLSHVGQLATLFSGSSLTDNSNTGVVRLGDGRVLCLTETIKGSIVVDPDTLDTIGKFEYTDRLGGLIHSAHPIVTDTEFWTLIPDLIRPGYSVVRMDAGTNERRFVGRVDCRGGPAPGWVHSFPITDHYVVVPEMPLRYCARNLLRAEPTPLYKFEWHLESGSYMHVMCKASGRVVATVEVPPFVTFHFINAYEEKDDEGRVTAIIADCCEHNANTSILDKLRLQNLRSSTGQDVLPDARYGTKFRSERERLVSESDVRAVVLGGTGRDIQGGPLQDPAGREPVRRAGAGAGPGPARPRDGHVQHQPGPRRQEVPVRLRLRSPPAVQLPQHPHQDRPGGEDGQELVRGGRRAVRALLRAAPRRRGGGRRRRDLDGERQGRIGLRVGAGRQDVPRDRAGQVPVRDALRLALLLGA

SEQ ID NO: 2528 - protein, 297 aa, Zea mays
MANRGAAAGKLTVAETFSNLREQGKSAFIPFITAGDPDLATTSKALKILNSCGSDVIEVGVPYSDPLADGPVIQASATRALKKGTTLDSVIEMLKGVTPELSCPIVLFTYYNPILKRGVGNFMSFIKQAGIHGLVVPDLPLEETALLRSEAIMHNIELVLLTTPTTPTDRMKGIAQASEGFLYLVSAVGVTGARSNVNLRVEHLLREIKKVYFLVSMTCGASGIQMVIFLALQVTDKPVAVGFGVSTPEHVKQIVGWGADGVIVGSAIVRQLCEAATPEEGLERLEEYARSMKAAMP

SEQ ID NO: 2529 - protein, 1002 aa, Zea mays
MTFQAASPPNNVRADVFLARPESFQSNPHPGNRLPCCPIPAMHRVAPSLRICFLYKLQTTTPFCRFLVRLLHAHHCTSPMAEAISATSSCLEPLCGCLESTGVFEAVGREVAAFLRIKSNCGDLEKARDSLRAVETTVRARVTAEEDKLNVCDPQVQAWLKRVDELRLDTIDEDYSSLSGFSCLCQCTVHARRRASIGKRVVDALEEVNKLTEEGRRFRTFGFKPPPRAVSQLPQTETVGLEPMLARVHDLLEKGESSIIGVWGQGGIGKTTLLHAFNNDLEMKDHHYQVVIFIEVSNSETLNTVEMQQTISDRLNLPWNESETVEKRARFLLKALARKRFLLLLDDVRKRFRLEDVGIPTPDTKSKSKLILTSRFQEVCFQMGAQRSRIEMKVLDDNAAWNLFLSKLSNEAFAAVESPNFNKVVRDQARKIFSSCGGLPLALNVIGTAVAGLEGPREWISAANDINMFSNEDVDEMFYRLKYSYDRLKPTQQQCFLYCTLFPEYGSISKEPLVDYWLAEGLLLNDRQKGDQIIQSLISACLLQTGSSLSSKVKMHHVIRHMGIWLVNKTDQKFLVQAGMALDSAPPAEEWKESTRISIMSNDIKELPFSPECENLTTLLIQNNPNLNKLSSGFFKFMPSLKVLDLSHTAITTLPECETLVALQHLNLSHTRIRLLPERLWLLKELRHLDLSVTAELEDTLNNCSRLLNLRVLNLFRSHYGISDVNDLNLDSLKALMFLGITIYTEKVLKKLNKTSPLAKSTYRLHLKYCREMQSIKISDLDHLVQLEELYVESCYNLNTLVADTELTASDSGLQLLTLSVLPVLENVIVAPTPHHFQHIRKLTISSCPKLKNITWVLKLEMLERLVITHCDGLLKIVEEDSGDEAETTMLGQGHPSEEQEDKRIDGGQSVCKSDDNAHAELLNLRSIVLTDVKSLRSICKPRNFPSLETIRVEDCPNLRSIPLSSTYNCGKLKQVCGSVEWWEKLEWEDKEGKESKFFIPI

SEQ ID NO: 2530 - protein, 552 aa, Zea mays
MRIGGIALMVVGSADPVVAIGFRALLRWLHTPSFATVSPQEVSGSSPAEVQNFVQGSWTASANWNWIVDPLNGDKFIKVAEVQGTEIKPFVESLSKCPKHGLHNPLKAPERYLMYGDISAKAAHMLGQPAVLDFFAKLIQRVSPKSYQQALAEVQVSQKFLENFCGDQVRFLARSFAVPGNHLGQRSNGYRWPYGPVAIITPFNFPLEIPLLQLMGALYMGNKPVLKVDSKVSIVMEQMIRLLHDCGLPAEDMDFINSDGAVMNKLLLEANPKMTLFTGSSRVAEKLAADLKGRVKLEDAGFDWKILGPDVQEVDYVAWVCDQDAYACSGQKCSAQSVLFMHKNWSSSGLLEKMKKLSERRKLEDLTIGPVLTVTTEAMIEHMNNLLKIRGSKVLFGGEPLANHSIPKIYGAMKPTAVFVPLEEILKSGNFELVTKEIFGPFQVVTEYSEDQLELVLEACERMNAHLTAAVVSNDPLFLQDVLGRSVNGTTYAGIRARTTGAPQNHWFGPAGDPRGAGIGTPEAIKLVWSCHREVIYDVGPVPESWALPSAT

SEQ ID NO: 2531 - protein, 165 aa, Zea mays
MMMASVLAVSRWSSLLLPLLLLLLLLLVATASQALNVGDLLGTAAPSGSQGCSRTCESSFCIVPPLLRYGKYCGILYSGCPGEKPCDALDACCMVHDHCVDTHNNDYLNTRCNENLLSCLDGVSPAGPTFPGNECDVGQTASVIRGVIESAVLAGKILHKRDDGQ

SEQ ID NO: 2532 - protein, 321 aa, Zea mays
MAPAVAAAASAAMRQALRDRQILDAVGTGAAALSLAGSSFIVICYLLFRELRKFSFKLVFYLAVSDMFCSLFTILGGPSNAFYCFAHDYSAHFFCVASFLWTTTISFTLHRTVVKHKTDVEEFGSIFHLYVWGTSLSTTVLRSIGSDYGRPGTWCWIQQGSMAKVLHLITFYLPLWGAILYNGFTYYEVNRMLNNATQMAAGISDQSNQSDIRAGRKAFNRWGYYPLILIGSWAFATINRLYDFANPGHRIVWLSFLDVGFAGLMGLFNSIAYGLNSSVRRAIAERIDTFLPERIKRSLPALSRLRSQQENELTSLIVEGN

SEQ ID NO: 2533 - protein, 691 aa, Zea mays
MEASAGSSPPHSQENPPEHGGDMGGAPAEEIGGEAADDFMFAEDTFPSLPDFPCLSSPSSSTFSSNSSSNSSSAYTNTAGRAGGEPSEPASAGEGFDALDDIDQLLDFASLSMPWDSEPFPGVSMMLENAMSAPPQPVGDGMSEEKAVPEGTTGGEEACMDASEGEELPRFFMEWLTSNRENISAEDLRGIRLRRSTIEAAAARLGGGRQGTMQLLKLILTWVQNHHLQRKRPRDVMEEEAGLHVQLPSPVANPPGYEFPAGGQDMAAGGGTSWMPHQQAFTPPAAYGGDAVYPSAAGQQYSFHQGPSTSSVVVNSQPFSPPPVGDMHGANMAWPQQYVPFPPPGASTGSYPMPQPFSPGFGGQYAGAGAGHLSVAPQRMAGVEASATKEARKKRMARQRRLSCLQQQRSQQLSLGQIQASVHLQEPSPRSTHSGPVTPSAGGWGFWSPSSQQQVQNPLSKSNSSRAPPPSLEAAAVAPQTKPAPAGARQDDIHHRLAAASDKRQGAKADKNLRFLLQKVLKQSDVGSLGRIVLPKKEAEVHLPELKTRDGISIPMEDIGTSRVWNMRYRFWPNNKSRMYLLENTGEFVRSNELQEGDFIVIYSDVKSGKYLIRGVKVRPPPAQEQGSGSSGGGKHRPLCPAGPGRAAAAGAPEDAVVDGVSGACKGRSPEGVRRVRQQGAGAMSQMAVSI

SEQ ID NO: 2534 - protein, 349 aa, Zea mays
MASNLLSAVAIEKETPESELPPTFLREDGRGAGSVRARFESMIRRVQGEVCAALEEADGGGARFVEDVWSRPGGGGGISRVLQDGRVFEKAGVNVSVVYGVMPPDAYRAAKGEAGKNEVAADGHKPGPVPFFAAGISSVLHPKNPFAPTLHFNYRYFETDAPKDAPGAPRQWWFGGGTDLTPSYIIEEDVKHFHSVQKQACDKFDPSFHPRFKKWCDDYFYIKHRNERRGLGGIFFDDLNDYDQEMLLNFATKCADSVLPAYIPIIERRKDTPFNEEHKEWQQLRRGRYVEFNLVYDRGTTFGLKTGGRIESILVSLPLTARWQYDHKPEEGTEEWKLLDACINPKDWI

SEQ ID NO: 2535 - protein, 451 aa, Zea mays
  misc_feature (26)..(59): Xaa can be any naturally occurring amino acid
MYIVEVCVLHPASGLWLWASVFFLPXXXXXXXXXXXXXXXXXXXXXXXXXXXXXXXXXXAATRLTSAVEEDKRSSPLGEGDEHVAASGAAGGEFDPGAPPPFGLAEIRAAIPKHCWVKDPWRSMAYVLRDVVVVLGLAAAAARLDSWLVWPLYWAAQGTMFWALFVLGHDCGHGSFSNNPKLNSVVGHILHSSILVPYHGWRISHRTHHQNHGHVEKDESWHPLPERLYKSLDFMTRKLRFTMPFPLLAFPLYLFARSPGKSGSHFNPSSDLFQPNEKKDIITSTASWLAMVGVLAGLTFLMGPVTMLKLYGVPYFVFVAWLDMVTYLHHHGHEDKLPWYRGQEWSYLRGGLTTLDRDYGLINNIHHDIGTHVIHHLFPQIPHYHLIEATEAAKPVLGKYYKEPKKSGPLPWHLFGVLAQSLKQDHYVSDTGDVVYYQTDSKTNTSAQKSD

SEQ ID NO: 2536 - protein, 185 aa, Zea mays
MGRGKIVIRRIDNSTSRQVTFSKRRNGIFKKARELAILCDAEVGLVIFSSTGRLYEYASTSIKSVIDRYGRAKEEEHVADPNTELKFWQREAASLRQQLHNLQENHRQLMGQDLSGLGVKGLQNLENQLEMSICCIRTKKDQLLVDEIHELNRKGSLIQQDNMGLHRKVNLIRQENAELYKKVFL

SEQ ID NO: 2537 - protein, 823 aa, Zea mays
MYFAKLDDSPMFRTQIQSLEESAELLRERCLKFHKGCRKYTEGLGEAYDGDIAFASSLETFGGGHNDPMSVAFGGPVMTKFTIALREIGTYKEVLRSQVEHMLNDRLLNFVDIDLHDVKDAHKRFDKASLSYDQIREKYLSLKKGTRPDITTAIEDELHSARSSFEQARFNLVTSLSHVEAKKRFEFLEAVSATMDSHLRYFKQGYELLHQMEPYINQILAYAQQSRERANKEQASLVERMHEYKRQIDRESRSSINGLNDSYNGDRMQTIGRSSHKQIEAVMQSTSKGKVETIRQGYLSKRSSNLRADWKRRFFVLDSRGMLYYYRKQITRPPAGCSMQRNVNPPEHGSGLLSRLFSSHYHIHDEKSVARHTVNLLTSTIKVDAEQSDLRFCFRIISPTKIYTLQAESAVDQMDWIEKITGVIASLLSSQSPEQCFMSSPKGSGHDRSTSDGSSFTSSVEFEPSVIDDLVLEKYSGNGQHDVIRGTHHHRTSMKPEKPIDLLRKVDGNNMCADCGALEPDWASLNLGALLCIECSGVHRNLGVHISKVRSLTLDVRVWEPSVINLFQSLGNMFVNNIWEDMLPDDNSSADGSDTSQYLSVSKPKHKDVFSAKEKFIHAKYVDKEFIRKRSMDENQLAEQMWNSVAANDKKTAYSLIVRSRANVNLVYGEMPSSPFLTLGKALQQEQPVSPPDGSPKFFDCNSHDKISPREPLSPASTSSRTDDMEDGCEGLSLLHLACRVADVGMVELLLQYGASVNMNDSRGRTPLHHCILKGRHRHAKLLLSRGADSQAMDRDGRTALQYAIDGGTSDEDILALLEDHSR

SEQ ID NO: 2538 - protein, 432 aa, Zea mays
MWDLNDSPAAEAAPPSPSADDSGASFSSAAALVDIPDDDSAAAAVVTRQFFVLAPAATIGAAPGSSNARAGWLRRAAAPAGGPAAVQAAAGKKSRRGPRSRSSQYRGVTFYRRTGRWESHIWDCGKQVYLGGFDTAHAAARAYDRAAIKFRGVEADINFSLEDYQDDMKQMCHLSKEEFVHVLRRQSTGFPRGSSKYRGVTLHKCGRWEARMGQFLGKKYVYLGLFDTEEEAARAYDRAAIKCNGKDAVTNFDPSIYAEEEVAPAAATGGAAGDEHNLDLSLGSSAGNKRGSLDGGGGGGGDDKSSDQRVPMAFDIDWQTAARRSTKAKLLSNGDPGTAAGGLSLAIGGGGGHWPPQLQHQQQQQRLHGARNNGGGTSWPPPPHPCPPPVPAAAATAAAASSRFHPYVVTSTTQSPAGWVQKNGFHSLARPT

SEQ ID NO: 2539 - protein, 678 aa, Zea mays
MVDLRSLLVAGVVLLAGLAVLVHGAGDEQFVYSGFTGAPLALDGTATITPSGLLELTNGTAQLKGHAVHPAPMRFQRTPGGPVRSFSASFVFGIIPPYSDLSGHGIVFFVGRDSFATALPSQYLGFLNSSNNGNFTNHVFGVELDTIQSTEFKDPDNNHVGIDVNSLTSANASTAGYYDDGTGAFHDLTLISAKPMQVWLDYDGETAQVNVFLAPLRTPKPTRPLVSAAQNLSGVVVDPAYVGFSSATGTVRSEHYVLGWSFAMDGPAPDIDIASLPKLPRFGPNPRSKVLEVVLPIATAASVLGVVAVVVALVRRRLKYAELREDWEVEFGPHRFTYKDLFRATEGFKTKMLLGAGGFGRVYRGVLPKSKREVAVKKVSHESRQGIKEFVAEVVSIGRLRHRNIVQLLGYCRRKGELLLVYDYMPNGSLDKYLYGKDDKATATLDWAQRFRIIKGVASGLLYIHEDWEQVVIHRDIKASNVLLDSDMNGRLGDFGLARLYDHGADPQTTHVVGTMGYLAPELARSGKASPLTDVFAFGAFILEVVCGRRPVEQSMTDSRLMLVDWVLEHWQNGTLADVIDAKLKGSCDEEEAMLALKLGLLCSHPLPAARPSMRQVMQYLDGDMPFPELTPSHLSFSMLALMRSEGFDSFILSASTTQPLSSTAMSIGTMTGLSDGR

SEQ ID NO: 2540 - protein, 221 aa, Zea mays
MAGVGSALRRLYLSVYNWVVFFGWAQVLYYAVLTLRLSGHKAVYAAVERPLQFAQTAAIMEIVHGLVGLVRSPVSATLPQIGSRLFLTWGVLWSFPETQSHLLVTTLVISWSITEIIRYSFFGTKEAFGFAPSWLLWLRYSTFMLLYPTGISSEVGLIYIALPYMKASEKYCIRMPNKWNFSYDYFYSSVLALLIYVPGSPHMYRYMLSQRKKALSKAKAA

SEQ ID NO: 2541 - protein, 385 aa, Zea mays
MLSCIACVNKEEDGGRDREEHGGDTPSCRDPVKSLTSQLKDMVLKLSGTHHRQHGAQHRRGGSPPPPRGRATSLYRSGYYRPGVVQDDMAVPPATYLGGGGAGASSASSTPAWDLPAAARADGEACREWVAQVEPGVQITFVSLPGGAGNDLKRIRFSREMYDKWQAQKWWGDNNERIMELYNVRRFSRQVLPTPPRSDDAERESFYSQSQVGSPSATPSPAPLTPERISWGAFARQVAAPPASSGATGAARQHSFRPMSPPPPSSSNPSERAWQQQQQRHIGGGGGGGAAGGKSPAASEAAAAATEAARTTTSSRDDVSVSNASELEVSEWIIQDQPGVYITVRELADGSRELRRVRFSRERFAELNAKLWWEENKERIQAQYL

SEQ ID NO: 2542 - protein, 694 aa, Zea mays
MPALAVDAATPVAHAFASCDAARFPAPPVVGPAAAAEAAPWSADLSAALYNVDGWGAPYFFVNDDGDVAVRPHGAATLPGQEIDLAKVVAKAAGPRAGGGLGLPLPLLVRFPDVLRHRVETLNAAFGYAVRSTGYGSRYQGVYPVKCNQDRYVVEDIVEFGAPFGFGLEAGSKPELLLAMSCLAARGGLDALLICNGYKDDGYVSLALMARSMGLNTVIVLEQEEELDIVVEASRRLGVRPVVGMRAKLRTKHAGHFGSTSGEKGKFGLSAAQILSVVTKLKAIGMLDCLQLLHFHIGSQIPTTALLSDGVGEAAQIYCELARLGADMRVIDVGGGLGIDYDGTHSAQTDMSVAYSLEEYAGAVVAAVGRVCDRKGVQHPIICSESGRALVSHHSVLVFEAFSATAPGRLDAATAYLLDELTDDCRADYRNVMAAAVRGDYDTCGLYADQLKRRSAEQFKEGVLGLEHLAAVDAFCELVARGMGAPEPPRTYHINLSVFTSLPDMWAIGQQFPIIPIQRLQERPAVDGVLSDLTCDSDGKVSEFIGGRHSLPLHELPTHATRGYYLGMFLGGAYQEALGGLHNLFGGPSVVRVSQCDGPHCFAVTRAAAGPSCADVLRAMQHEPEVMYEVLKQRTDGATAAALARAFGAMPYLVFDPEAAVMSGGESSDSERSAAGAAEEEDDEEWEFMRGLTV

SEQ ID NO: 2543 - protein, 350 aa, Zea mays
MQRGQEQRAMELVLPPGFRFFPTDEELLTCYLARKAMDGSFTTAAIREVDLYKTEPWDLPCEQQAAAAGGDLHEGYFFCTRGSKSPSGIRARRATQLGYWKSTGKDKPVHSRSGRLVVGTRKTLVFYRGRAPRGEKTDWVMHEYSMGERRSSALLRGAQSEWVICRVFTRKQHPVISNDRKLPEMEEAAVHGHGHRSPGHLLATEAADDGFDSEQESAPPVVVTETQHTSGSHIGGAQAMEGDDDHYQHRQIAHEELLTTMHHHHGSSRVVSPACWLNQHDDRLGSHYYCPALPVMQSDDADYYLPELLEYSGPLDTGGEEDCRLRAETQFTAVGSSDHIDDGLYWDIGF

SEQ ID NO: 2544 - protein, 285 aa, Zea mays
MAASPSPSGSGGGKAGVDRIKGPWSPEEDEALQRLVRRHGARNWSLISRSVPGRSGKSCRLRWCNQLSPRVEHRPFTPDEDDAILRAHARFGNKWATIARLLSGRTDNAIKNHWNSTLKRERERKREYYADARPGPGDQRSLKRTSSDGPPGSPSGSDLSDSSHQSLPTVMPSAASTAVTSQQQLQHVYYRPVPRAGGVVLLPVAPPSPQAPPATSLSLSLSLPGLDQQPEPSPPPPPTPQAQASSPLSAEFLLMMQEMIRIEVRNYMSGSGFDAHAVMGMAEID

SEQ ID NO: 2545 - protein, 235 aa, Zea mays
MCGGAIISEFIPHRGAKRGLCAEDIWPHAAADFDDLLHAHAHAHGHDDDDFAAAASFHPDQEPPARKRERKTMYRGIRRRPWGKWAAEIRDPAKGARVWLGTFATAEAAARAYDRAARRIRGAKAKVNFPNEDPPPEYDDDDDGHAHAHAAAAQGMLAMSAGGGRDDHLVDYDVVDVMGMGGFFQHHAYVPDAVAQQEQVPTVAYVHHQPPPQQPQGAAGMDMWTFDAINTPVPM

SEQ ID NO: 2546 - protein, 953 aa, Zea mays
MKERERVTRKHLLLLQSSSTVLLLNKPRALLLLSSPPPHSTTAHSHPTRAQPPPTPYSLHYSPRKHAQRHGHGGSAHGGLLLRLRFLSSPALLAGPLATMAAVASRERLSPGAAPQVDAGKYVRYTPEQVEALERVYSECPKPSSLRRQHLIRDCPILRNIEPKQIKVWFQNRRCREKQRKESSRLQTVNRKLSAMNKLLMEENDRLQKQVSRLVFDNGYMKNRLHSPSVATTDTSCESVVTSGQHNQQQNPAVLHPPQRDANNPAGLLAIAEETLAEFMSKATGTAVNWVQMVGMKPGPDSVGIIAVSHNCSGVAARACGLVSLEPTKVAEILKDRASWYRDCRHVDVLHVIPTGNGGTIELIYMQTYALTTLAEPRDFWTLRYTSGLDDGSLVICERSLTQSTGGPSGPNTPNFIRAEVLPSGYLIRPCDGGGSMIYIVDHVNLNACSVPEVLRPLYESPKILAQKMTAAALRHIRQIAHESSGEMPYGAGRQPAVLRTFSQRLSRGFNDAVSGFPDDGWSCLLNTDGAEDITVTINSSPNKLVGSHVSASPLFSAMGGGIMCAKASMLLQNVPPALLVRFLREHRSEWADPGIDAYSVASLRANPYTVPGLRAGGFMGNQVILPLARTLEHEESLEVIRLEGHGFSHEEVLMSRDMFLLQLCSGVDEDAPGACAQLVFAPIDESFADDAPLLPSGFRVIPLDAKTDVPTATTRTLDLASALEVGSGGSGMRASCDGSGTCATRSVLTIAFQFSFENHLRESVAAMAKQYVRGVMASVQRVAMAIAPSRLGSRIELKHPPGSPEALALATWIGRSYRAHTGTEIRWSDTEGADSPLMLFWKHSDAILCCSLKPPAFTLKFANSAGFDILETTMVNIQDLPLEAVLDEEGQKALSAQLPAIMQQGLAYLPGGVCRSSMGRQASYEQAVAWKVVGDDGAPQCLALMLANWTFI

SEQ ID NO: 2547 - protein, 524 aa, Zea mays
MDTGCLQPPCNPSSSEASGGDASDACGSASASRSSSARRSKGVRLRLRLRRRRQEPGPAATPGGEGQGGAGVQVQDDLALPLGMSFAAVLAQVVNTKNRSGERLQPALLSKICTSAVKESLRNIYGNKLDSFMRNFEKSFSSTLTTLHLVNEMPVYGQGPVPQCSSKHEDSEASSKLSTGGTQNLTREIKQERLNSVESQLVLYAGGYQQMTRRAHSLSSPEADQRILNAFERSLKEQTRSNELKEFEISLSMRKLKLKQSQLELNSYSHMLDKIKLSLGFQKASFQVEKFKTQMQDTRHAQIMRTLIDFLVSAVIIMSVCFGYGTYTYSYQRITDITAACSATSKGSKSWWMPNSVSNFNTGLLFIRCHVIAATRMFFGIVMILAVVWLAFQRSAVSVSSMPVTFNIILLGVICGYAGRFCTNTLGGDGNMWLICWEVLCSVHLIGNCYPSVLYRVLHGPISVSHSKESVWFPYWIRRWMFYAVLGFFIPALNGLLPFASLSDWNNHFTKELKSIFIDERIEA

SEQ ID NO: 2548 - protein, 404 aa, Zea mays
MVEAPAVVVVVRAYDAARDRVGVEEVERACEVGCSGGGKMCLFTDLLGDPLCRIRHSPDSLMLVAETATGPNSTEIAGVVRGCVKTVVSAGTTTTQQANKDDPIYTKVGYILGLRVSPSHRRKGVGKKLVDRMEEWFRQRGAEYSYMATEQDNEASVRLFTGRCGYAKFRTPSVLVHPVFRHALRPSRSAAIVALEPREAELLYRWHFAGVEFFPADIGAVLSNALSLGTFLALPSSPARWEGAEAFVAAPPASWAVLSVWNCMDAFRLEVRGAPRLMRAAAGATRLVDRAAPWLGIPSIPNLFAPFGLYFLYGLGGAGPDAPRLARALCRSAHNMARDGGCGVVATEVGACEPVRAGVPHWARLGAEDLWCIKRLADGYGSGPLGDWTKAPARRSIFIDPREF

SEQ ID NO: 2549 - protein, 551 aa, Zea mays
MALTLRSSTSFLSPVDPTSKLLHKPADEAQPCCVAVPPAPGRRPRALRAAAAAATSPATGRAPAEAGELLHGGGADQHHGLPRGGVPVYVMLPLDTVGPGGQLSRQRALAASLMALRGAGVEGVMVDVWWGVVEREGPGRYDWEAYAELVRMVERAGLRLQAVMSFHQCGGNVGDTCNIPLPPWVLEEMSSNPDIVYTDRSGRRNPEYISLGCDTLPVLKGRTPIQVYTDYMRSFRERFRDYLGNVIAEIQVGMGPCGELRYPSYPEANGTWRFPGIGEFQCYDKYMRASLEAAAVAAGHQEWGRGGPHDAGEYKQMPDDTGFFRREGTWSTEYGHFFLAWYSGMLLEHGDRVLAAAEAVFGGTGATLSAKVAGIHWHYRTRSHAAELTAGYYNTRDRDGYAPIARMLAKRGAVLNFTCMEMKDEQQPKHASCSPELLVQQVKTAASAAGVELAGENALERYDEAAFSQVASTARGAGLAAFTYLRMNKTLFDGDNWRQFVSFVRAMADGGARPALPRCDTGHSDLYVGFLDAAKKSKAPEAEGAATAAAL

SEQ ID NO: 2550 - protein, 230 aa, Zea mays
MEVAAASAASYGFKADDDVDSLRATELRLGLPGTEEKEEAEEPQHKAAPPPPSTPRGKKRDVVASSGPEDAPKKRDCETDADADAAPPPAAKAQLVGWPPVRSYRKSCFQQQAAAKNKPAAALAEEAPAAGGLFVKVSMDGAPYLRKVDLKMYKGYRELREALEAMFLCFSGAADAPAVNPSDFAVTYEDKDGDLMLVGDVPFGMFISTCKRLRIMKGSEARGLGSAKNN

SEQ ID NO: 2551 - protein, 693 aa, Zea mays
MQVPGRLRRVLRAPPPRILLYRAISSPPPGGGSGVAVKQVTRGNMEEALEKLRGRVREAAFVGLDLEMSGVTSAPWRDTFELDRADVRYLKLRDSAERFAALQLGVCPFRWDPAKSAFVAHPHNFFIFPRKELPSDCSSHEFLCQTTSIEFLAKYQFDFNTCFREGISYLSRAQEEEALQKFNMLHHGRTVTSSTNSEEDGDMPLKSASDILFTERMKMNFKEWRDAIASKPMVDNHLSGNIKCGSGQFQTVFFKMRPAIILNGFSSHQLKLIQQVLRKNFRDLIFVCTFGEDDTSEKKVVYSDTDEDRILLMKDVQEDLLKNREERIKSAIGIRHVIDLLSSERKLIVGHSCFLDIAQVYSKFVRPLPSSIKEFALSFHKFFPHIADTRHLMSVNQAVQKLMKHKSKSLSSAFLLLCPASYSSVEKPSSHSPVTIEVEGDETMSSRFISGAKHEAGYDAYMTGCIFAQLCAYLGIQFEQFSPLDNLATNTKLQKHINFLSPSWNSGTVLDLSTGMETPDPGYTRRYPAAVYDNIVVIWGFLSKVRPKEIKDCICKVFGSGSVTTVFSIDSTAALVQFKKQESVNDFLDLKAVLERADSAISILHPLSTILEGGQTRAAKYDTYRDICSSSESKYLFADQAEAVCATSKNQLIENVDGNLISDVLDGVALASVTEEDGIIPSSKNQNVAEATC

SEQ ID NO: 2552 - protein, 940 aa, Zea mays
MYADVVARRIENLANMCDERARMLQDQFNVSMNHVHALAILVSSFHHGKDPSAIDQKTFEDFTARTTFERPLMSGVAYALKVLHNERQQFEEQHGWKIKKMEDGDQSLVHDYNLEKLEPSPVQDEYAPVIFSQETVKHIISVDMMSGKEDHDNILRSWSTGKGALTSPFKLLKSNHLGVVLTFTVYKYDLPPNATPQERIHATLGYLGASFDVPSLVDKLLEQLASKRKIVVNLYDTTNHTSPIEMYGSDFTPSGDLHISSIDFGDPTRKHEMHCRFKHEPSLPWSAIIISTAVAIIVLLVGHIIYATLNSLEKAEHDYRVMRELKGQAEAADIAKSQFLATVSHEIRTPMNGVLGMLQMLMDTELDTTQQDFVVTAQESGKVLINLINEVLDLAKIESGRIELEAVPFDVRDILDNVISLFYDKSQAKGIELAVLVSDQVPDVLIGDPWRFRQIITNLVGNSMKFTEQGHIFVQVHLVKELNRKGNNFCDVSAHNREILYDSDNSMLWNTLSGLEVADSWRSLENFTMFKNSNGETDTIRLAVRVEDTGIGITKDAQMRIFTPFMQADSSTSRTYGGTGIGLSITKRLVELMGGEIGFTSKSGVGSTFSFTAIFKENRGCPGDMKRYYSEPTPLDFQGMRALIIDGRSARAEVTMYHLRRLGIQCSLVATSESESASSALMKACTSSKNNPDMVLVDTEAWGKGSGLAFYHRFVDCQLKGAHKFSQPMPKTILLGSSISPVESDYLRLTGFGDCIRKPLRLSTIVACLRKTLGVGVTRQQSRDQSLVLQSVLTGKQILVVDDNAVNRKVAAGSLKKYGSKVTCVDSGSDAIDMLKPPHTFDACFMDVQMPEMDGFEATRLIRSIEKKINDMIMMGEISANNYGNKAHWHVPILAMTADVIQATFEKCMQCGMDGYVSKPFEEQQLYFAVAHFLETDETE

SEQ ID NO: 2553 - protein, 688 aa, Zea mays
MAGLEIGPASPGSEGAPSPASSVGASVERPEQSSPRVTKRPGLVMSFSGKRLDQSPAGSPSPSPSLSRPVLVMSHSSNRLDQSPARPVLVMSRSSNRLDQSSPASSPAPVKAPVLVMSGSSNRLDSSHPSPSPSPSPTAAAAAAPVLVLSNSGKRMDQVGRKKYVKQVTGRHNDTELHLAAQRGDLEAVRQIIAEIDAQMTGTGEEFDNEVAEIRAAIVNEANEMEATALLIAAEKGFLDIVVELLKHSDKDSLTRKNKSGFDALHVAAKEGHRDIVKVLLDHDPSLGKTFGQSNVTPLITAAIRGHTEVVNLLLERVSGLVELSKANGKNALHFAARQGHVEIVKALLDADTQLARRTDKKGQTALHMAVKGTNPEVVQALVNADPAIVMLPDRNGNLALHVATRKKRSEIVNVLLLLPDMNVNALTRDRKTAFDIAEGLPLSEESQEIKECLSRAGAVRANELNQPRDELRKTVTEIKKDVHTQLEQARKTNKNVYGIAKELRKLHREGINNATNSVTVVAVLFATVAFAAIFTVPGGNTDDGVAVAVHATSFKVFFIFNAVALFTSLAVVVVQITVVRGETKAERRVVGVINKLMWLASVCTTVAFISSSYIVVGRHFKWAALLVTLIGGVIMAGVLGTMTYYVVKSKRVRKIRKKVKSTRRSGSNSWHHNSELSDSEVDRIYAI

SEQ ID NO: 2554 - protein, 1379 aa, Zea mays
MSSSLVSTPFAAAAQKRLLAAPVPLHSFLLSGRRQPPRRAGTIRCAVAGGNGLFTQTKPEVRRVVPSDPRGLPRVKVVYVVLEAQYQSSVTAAVQQLNADPRRAAAFEVVGYLVEELRDEDTYATFCADLADANVFIGSLIFVEELALKVKAAVEKERDRMDAVLVFPSMPEVMRLNKLGSFSMSQLGQSKSPFFQLFKRNKANSSNFADSMLKLVRTLPKVLKYLPSDKAQDARLYILSLQFWLGGSPDNLQNFLKMIAGSYVPALKGAGIKYDDPVLYLDSGIWHPLAPTMYEDVKEYLNWYGTRRDANDRLKDPKAPIIGLVLQRSHIVTGDDGHYVAVIMELEAKGAKVIPIFAGGLDFSGPTQRYLVDPITGKTFVNAVVSLTGFALVGGPARQDHPKAIAALQKLDVPYIVALPLVFQTTEEWLNSTLGLHPIQVALQVALPELDGGMEPIVFAGRDPRTGKSHALHKRVEQLCTRAIRWAELKRKTKEEKRLAITVFSFPPDKGNVGTAAYLNVFSSIYSVLSDLKKDGYNVEGLPDTPEALIEEVIHDKEAQFNSPNLNVAYRMNVREYQSLTSYASLLEENWGKPPGHLNSDGENLLVYGKQYGNVFIGVQPTFGYEGDPMRLLFSKSASPHHGFAAYYTFVEKIFQADAVLHFGTHGSLEFMPGKQVGMSDACFPDSLIGNIPNIYYYAANNPSEATVAKRRSYANTISYLTPPAENAGLYKGLKQLSELISSYQSLKDTGRGPQIVSSIVSTAKQCNLDKDVPLPEEGEELPPKERDLVVGKVYAKIMEIESRLLPCGLHVIGEPPSAIEAVATLVNIAALDRPEDGITSLPGILAATVGRDIEDVYRGSDKGILADVELLRQITEASRGAITAFVEKTTNSKGQVVNVANNLSKILGFGLSEPWVQYLSATKFVRADREKMRVLFGFLGECLRLVVQDNELGSLKLALEGSYVEPGPGGDPIRNPKVLPTGKNIHALDPQAIPTTAALKSAKIVVDRLLERQKADNGGKYPETVALVLWGTDNIKTYGESLAQVLWMIGVRPVADTFGRVNRVEPVSLEELGRPRIDVVVNCSGVFRDLFINQMNLLDRAVKMVAELDEPAEMNYVRKHAQEQAEELGVSLREAATRVFSNASGSYSSNVNLAVENASWTDEKQLQDMYLSRKSFAFDSDAPGAGMKEKRKAFELALATADATFQNLDSSEISLTDVSHYFDSDPTKLVQGLRKDGRAPSSYIADTTTANAQVRTLSETVRLDARTKLLNPKWYEGMMKSGYEGVREIEKRLTNTVGWSATSGQVDNWVYEEANSTFIEDEAMRKRLMDTNPNSFRKLVQTFLEASGRGYWETTEENLDRLRELYSEVEDKIEGIDR

SEQ ID NO: 2555 - protein, 2193 aa, Zea mays
MQRYAGFSGSRDGARLEASPFSSSSSSGYPVSSRRQQQLTPYKLKCDKDPLNNKLGPPDFYPQTLNCPEETLTKDYVQYGYKETVEGIEEAREIVISQIPYFCKPDVVIKCKEALKKRLRAINESRAQKRKAGQVYGVPLSGSLLIKPGVYPEQRPCNEDTRRKWVEALAQPNKRLRSLSEHVPHGYRRKSLFEGLIRYNVPLLRATWFIKVTYLNQARPAPNSTSVVASDNQRSNQWTKDVVEYLQQILDEVCSKEGAIVPPSFKEQSSPGLAAGTNQIKMKTESSPAGDSEEPLVHFKWRYMVRLIQWHLTEELLVPSVLIEWLSNQLQERDSDDVLELLLPIILGLVDTITLSQTYVRMFVELLVRRLNVDRPKRFSVSSVIAELLRYMVLAVPDTFVSLDCFPFPSFVVPDVYGRGALLKITSGGGILCSKRRDAYRYLSCGYAVSSIQKRAHDLAAVANPSLQARGAAKVVQALDKALVTGNLSVAYFSLFNDLSDALMEERWIKEVNPCLQSSLMWIGTVELSLICSIFFLCEWATCDYRDCRASPSQNVKFTGRRDLSQIHMAVSILKNKMDEMNNLSRPKSSTRITLNKVAKGSLNDACLTAAAVDDSSGLRSNAKNVDEKKDTNDIFESPGPLHDIIVCWLDQHEVSNVAGFTRVDVLIAELIRNGIFFPQVYVRQLIISGITDKNDTMLDVERKRRHHRTLKQLPGSSLFDVLEETRTAEEQQLYEMMSTYSSERRLVLSELSCGHSFYASGRGEYTSSSCIRKQSDLPVASEGDKHGRVLEQVEDVKALLSSLLGFTYPPLVESKLCEIKTSFQESVTSTLTQVETGEAKSGCEDCMRSKGQKLDDSATPFQGFPLIQSGEEDIWWVKKGTKLQESFNVEPVQKSVKQTSRGRAKVVRKTQSLAQLAAARIEGSQGASTSHVCESKMSCPHHEPNNDGDNVKDFDHTRAANVTAIGKSLKRLRLLERRSVSSWLLKSIRQLVDGNGMTASKATNSISILPLQPDDKTASKWRLGDEELLSVLYVLDTCCDSVSGVKFLIWLLVKIRGVGSSGQPGRTYMLMRNRDHQVCQVNEALVFSSLLRYENILLATDILPDVLSALVNRNSMSATTRHPGSTAFAYVRYFLKKYRDVASVAKWEKNFRTTCDQRLLAELDNGRSIDGDLVSSSGILAGEEIDEQVRQKLNGRSSRLVQNMKEIVQRQADGIQRSLKEKKVLAGAAPRNPLTFEKEDSYQIAHDIVLGLVECIRQNGGANPDGDLSIVASAVSAIVVNAGHMIAKHLDFAGGNYQGVNSVATSLNFVRHTLLIHINSLCLLKETLGDRFSRAFEIALAVETSAAVTAAFAPPKMHRNQFQPSPEAHDAYGNHTSELSNSGKGFVGRTAKVSAAISALVVGAVVHGAVSLERMVATLKIKDGLDIMQLLRGLKSNTNGVSHPTGGFRIENSTEVSVHWFRILLGNCRTVYDGLIADILGDPYIIALSRLQRMLPLTVIFPPAYSIFAMVLWRRYIFNCEDPQLYQSFSNAINDITRHQPFREIYFRNTHRLYNLLASDVGDSKFAAMLESHSPDRNSKILPFIPLRARLFLDAIIDCNTPTIQGDGASEPCDPKDNELKLSERLMQLLDTLQPAKFHWQWVEMRLLLDEQALMEKVAAGKTTLESLRSLSPKAEGFALSDSEKGFTEVILSRLLARPDAAPLYSELVHLLGKLQESLVMDVKWILQGQDAILGRRSTRQQLVHIAQRKGLSTKAQVWKPWGWSSLLSDAIPNKTAKRKLEVTSIEEGEVVDDTVDAKRTTKTPPHSVDRSFEGIRSINKYLTEKALAELVLPCIDRSSADIRGILSVDLTKQMGAISEHIKAIALNGAKQAGSVSSGNEVPSNKSSGRRGIRGGSPNIGRRAPVGNDPSPPSASALRAALWLRLQFIIRLLPVIMADRSMRHTLASAILGLLATRMIYEDADLPLPPTNATALRRDVDSLLEPPLDVLLDRPGESLFEKLLCVLHALLGSYKPSWLKSRSASRSSIKSQRDFSAFDNEAAEGLQSALDHMELPETIRRRIQAAMPLLPPSRRPCMQCQPPQLSLAALSPLQSSTSGVGPQQKSSCVSWVPTNVSVRSKAALPSHDPETEVDPWSLLEDGTNCPPSTASGSNGSSGVTGDHANLKASSWLKGAVRVRRTELTYIGSVDDDS

SEQ ID NO: 2556 - protein, 463 aa, Zea mays
MAAAAAFSSTSVVAALAASGFLGKKLVTSIIIRNKKKGYDSLHGATTTIRVRAMAVNKETEQDRWRGLALDTSDDQQDITRGKGRVDPLFQAPMGDGTHVAVLSSYDYISQGLRHYSLDNMMDGYYIAPAFMDKLVVHIAKNFMPLPNIKVPLILGIWGGKGQGKSFQCELVLAKMGINPIVMSAGELESGNAGEPAKLIRQRYREAADMIKKGKMCVLFINDLDAGAGRMGGTTQYTVNNQMVNATLMNIADNPTNVQLPGMYNKEENPRVPIIVTGNDFSTLYAPLIRDGRMDKFYWAPTREDRVGVCKGIFRSDGVPDEDVVRLVDAFPGQSIDFFGALRARVYDDEVRRWVAETGVENIARRLVNSKEGPPTFEQPRMTLDKLMEYGRMLVEEQENVKRVQLADKYLSEAALGDANDDDDLYGKAAQHVRVPVPEGCTDPKAGNFDPTARSDDGSCVYN

SEQ ID NO: 2557 - protein, 315 aa, Zea mays
MTCLFMGGAFVSTPHRRKEARRPEGMATGSEASKAAEAVVDWHKHDSKRMLHAVYRVGDLDRTIKYYTECFGMKLLRKRDVPDEKYTNAFLGFGPENTNFAVELTYNYGVDKYDIGTGFGHFAIANDDVYKLAENIKSKGGKITREPGPVKGGSTVIAFAQDPDGYMFELIQRADTPEPLCQVMLRVGDLERSIKFYEKALGMKLLRKKDVPDYKYTIAMLGYADEDKTTVLELTYNYGVTEYSKGNAYAQVAIGTNDVYKSAEAVDLATKELGGKILRQPGPLPGINTKIASFVDPDGWKVVLVDNTDFLKELH

SEQ ID NO: 2558 - protein, 1331 aa, Zea mays
MSSLVERLRVRSERRPRYALDESDDDLPLRVGAGKGKDQQNDAPAERIEREDAKEEACQRCGKSDNLVSCSTCTYKFHRKCLVPCLNITSDKWSCPECVSPLTEMERILDIEVLEAPREDSSSTEPRSKKMERYLIKWKGLSYIHCSWVSEKEYSEAANIHPRLRTRLNNFRRQKEAMKIEAERSGEDIVAIRPEWTTVDRILASRKNLVGDREYYVKWNELTYEECTWENESDITVFQPEIERFNEIQFRRKKSGDKGKATREPRQFKESPTFLSGGTLHPYQLEGLNFLRYSWFHNKRVILGDEMGLGKTIQSIAFLASLFEDKFGPHLVVAPLSTLRNWEREFATWAPQMNVVMYFGAAASRDIIRKYEFYYPKEKLKKLKKKKSSPSNEDKKQSRIRFDVLLTSYEMINMDSSILKNIEWECLVVDEGHRLKNKDSKLFGQLKDYNTKHRVLLTGTPVQNNLDELFMLMHFLEGESFGSITDLQEEFKDINQDKQIEKLHGMLKPHLLRRFKKDVMKELPPKKELILRVELTRKQKEYYKAILTKNYEVLARRNGGHTSLINVVMELRKLCCHGFMIDEPDLEPANPEEGLRRLLDSSGKMQLLDKMMVKLKEQGHRVLIYSQFQHMLDLLEDYLSYRKWTYERIDGKISGADRQIRIDRFNAKNSTRFCFLLSTRAGGLGINLATADTVIIYDSDWNPHADLQAMARAHRLGQTSKVMIYRLVSRGTIEERMMQLTKKKILLEHLVVGRLTKANNVNQEELDDIIRYGSKELFEDENDESRQIHYDEAAIERLLDRDQVDGDESVEDEEEDGFLKGFKVANFEYIDEAKAQAEKEEARRKAAAEAENSERNYWDELLKDRYDVQKVEEHTAMGKGKRSRKQMAAADEDDIHDLSSEDEDYSLEDDISDNDTSLQGNISGKRGQYSKRKSRNVDSIPLMEGEGRTLRVLGFNHAQRAMFLQTLNRFGFQNYDWKEYLPRLKGKSVEEIQRYAELVMAHLVEEINDSDYFSDGVPKEMMRVDDVLVRIANISLIEEKMAATGPGKITNIFPNYLLYEFQGLSGGRIWKAEHDLLLLRGILKHGYARWQYISDDRENGLFEAARRELHLPSVNEIIGAQLNEANGNLEGAQEGQANTTSMSHYKEIQRKIVEFLRKRYHLMERALNMEYAVIKKKIPVPDDITEQGVPAGHAPFIPDISELLRELPNLEPISTNELVSEGTAGQLQVPHLYNKMCGVLEESGAYALSSFFGDKSASSSLANSLRQFETVCENVVEALRPHQNGTGSAIKEELVDAATKAAAAAAPQQDSGHDAPHGQSSTAKADMEIDG

SEQ ID NO: 2559 - protein, 315 aa, Zea mays
MMNTRACGSGSGGRNDQTMMGFSEHPKPAASGQAQPSPPSSPSERPPAGRGRRRAQEPGRFLGVRRRPWGRYAAEIRDPTTKERHWLGTFDTAQEAALAYDRAALSMKGAQARTNFVYTHAAYNYPPFLAPFHHPSSVQQQHYGAAPHVGSYGHHHYHHQGSSAAVVGASSGECSSALPPVERADGTLLLDRGGGGGHHHHHHHHPEFLFASADDNSGYLSSVVPESCLRPRSSAAAVEDLRRYSDADAYGMGVGLREDVDDLAQMVAGFWGGGAGDADQLCGGGFPSGGAGDSMAVASSQGSSDGYSPFSFLSH

SEQ ID NO: 2560 - protein, 426 aa, Zea mays
MSMAFSCAGARLHGRTGVGGAKCRPGAALLGRRGTCFRPTAWRWSTARGIRADLPPPPRASADGAATSGPDVVVPEAGDATEEVAAVVQPVVLPEKLDVDDGGNGKLPPAAGGGGDGENGGGSGGGGDGDEEEDEFGPILSFDQVVQEAEKRGVSLPSLPTDIVEAAKSVGIQKLLLLRYLDMQASAWPLGPAIRSCSLLRNRMLVDPAFLFKIGTEIVIDTCCATFAEVQKRGEEFWSEFELYAADMLVGVVVNVALVGMLAPYARFGSRSASEGLLGRVRHAYDALPSSVFEAERPGYKFSVQQRIGTYFFKGILYGSVGFFCGLVGQGIANLIMTAKRSVKKSDDDVPVPPLLKTSALWGAFLAVSSNTRYQIINGLERLVEASPVGKRVPAASLAFTVGVRFANNVYGGMQFVDWARMSGCQ

SEQ ID NO: 2561 - protein, 590 aa, Zea mays
MGRGGARAAPAAAVPPWHALPDEVWEHAFSFLPADSDRGAAACACHAWLRFERRSRRRLAVANCYAASPRDAVERFPAVRAVEVKGKPHFADFGLVPPAWGADAAPWVAAAAAGWPLLEEISFKRMVVTDDCLEMIAASFRNFQVLRLVSCEGFSTAGLAAIAAACRNLRELDLQENEIEDCSIHWLSLFPVSFTSLVTLNFSCLEGDVNITVLEQLVTRCSNLKTLKLNNAIPLDKLANLLRKAPQIVELGTGRFSADYHPDLFSKLEAAFAGCKSLRRLSGAWDAVPEYLPAFYCVCEGLTSLNLSYATVRGPELIKFISRCKNLQLLWVMDLIEDHGLAVVASSCNKLQELRVFPSAPFEAAEQVSLTERGLVDVSASCPMLESVLYFCRRMTNEALITIAKNRPNFTCFRLCIIEPHTPDYITHQPLDAGFSAIVESCKGLRRLSVSGLLTDSVFKSIGAHADRLEMLSIAFAGNSDLGLHYILSGCKSLKKLEIRDCPFGDKPLLANAAKLETMRSLWMSTCSMTLGACRQLARKMPRLSVEVMNDPRRGFPLDSLTDESPVETLYVYRTISGPRSDTPACVQIL

SEQ ID NO: 2562 - protein, 375 aa, Zea mays
MAATSSLKSSLLLPSTISDFSGAAAAVSISTQKRRSRGARVQVSAAADSKNILVMGGTRFIGVFLSRLLVKEGHQVTLFTRGKAPITQQLPGESDAEYADFSSKVLHLKGDRQDFEFVKTSLAANGYDVVYDINGREAVQVEPIIEALPNLQQYIYCSSAGVYLKSDILPHCEVDAVDPKSRHKGKLETESLLTSRGVNWTSIRPVYIYGPLNYNPVEEWFFHRLKAGRPIPIPGAGNQITQLGHVKQDLARAFNLVLGNPKASKQIFNISGAKYVTFDGLARACAKAGGFPEPELVHYNPKEFDFGKKKAFPFRDQHFFASVEKATSELGWTPEFDLVQGLTNSYNLDFGRGTFRKEADFTTDDMILDKKLATV

SEQ ID NO: 2563 - protein, 905 aa, Zea mays
MAESSSRQAAEMVEKWMAFPSGSDAGSGFAFPAPRSVSGAGKEIVELASPSTATATATATTTASAGNRQASFQRGRDSGVGSTRSSMDGARASGDSSMPRVSQELKDALSSLQQTFVVSDATRPDCPIIYASAGFYTMTGYTPKEVTGRNCRFLQGPDTDMNEVAKIRDAVKTGRSFCGRLLNYRKDGTPFWNMLTVTPIRDDNGKVIKFIGMQVEVSKYTEGLSEKRMRPNEMPVSLIHYDDRQKETAMSSITEVVQTVKHPRARSEGEQEPVEPAPPVMASPLVAPGTPSGGASLKSPLWDVKKEDSRLSRKSSRRSSLMGFKMGKRSSIGSKDALPAEVEAPAPAPAPPESTTEKQRKNSWEQEGRERDIRQGIDLATTLERIEKNFVITDPRLPDNPIIFASDSFLELTEYTREEILGRNCRFLQGPETDMSTVDKIREAIREQKEITVQLINYTKSGKKFWNLFHLQPMRDQKGELQYFIGVQLDGSDHVEPLRNRLSENTELQSAKLVKATAENVDEAVRELPDPNLRPEDLWDIYSRYVSPKPHKRYNSSWIAMEKIIKSGVKIGLKHFKPIKPLGYGDTGSVHLVELQGSGELFAMKAMDKSVMLNRNKVHRACMEREIYSLLDHPFLPTLYTSFQTPTHVCLITDFCPGGELFALLDMQPMKLFREESARFYAAEVVIGLEYLHCLGIIYRDLKPENILLQEDGHIVLTDFDLSFLTSSKPHVIKHSTSRRRRSKEYLPPSFVSDPATPSNSFVGTEEYIAPEVITGVPHTSAIDWWALGILLYEMLYGRTPFRGKNRKRTFHNILHKDLTFPSSIPVSPAAKQLIHGLLQRDPSSRLGSSAAANDIKQHPFFEDIHWPLIRCMEPPELDVPLKLTRKEPEQKVKPEEDIYSCSDY

SEQ ID NO: 2564 - protein, 326 aa, Zea mays
MALTARVRRLPQLHISLDVPSCAFRHHNPPAAASTSASRASGEFRLSDFDRLAVLGRGNGGTVYKVAHRRTSALYALKVLHRGDPGAASEVDALRRADSSPHVVRCHSVLPAAAPGEVALLLELVDGGSLDAVAARRGAFAEAALAEVAAQALAGLAHLHARRVVHRDVKPANLLVSAAGEVKIADFGIAKVLSRAGDHCAAYEGTAAYMSPERFDTERHSHADPCAADVWSLGVTVLELLMGRYPLLPAGQKPSWAGLMCAICFGELPSLPDGAASPELRAFVAACLEKDYTKRASVAQLIAHPFVARRDVAASKDALRRLVAGA

SEQ ID NO: 2565 - protein, 668 aa, Zea mays
MPPPPPPPPLTPYCRRCPPPHLPPPPPSSPNHFLLHYLHQLDHQEAAAAAMVRKRPASDMDLPPPRRHVTGDLSDVTAAAAAGVGGSGAPSSASAQLPALPTQLHQLPPAFQHHAPEVDVPAHPAPAAHAQAGGEATASTTAWVDGIIRDIIGSSGGAAVSITQLIHNVREIIHPCNPGLASLLELRLRSLLAADPAPLPPPPQPQQHALLHGAPAAAPAGLTLPPPPPLPDKRRHEHPPPCQQQQQEEPHPAPQSPKAPTAEETAAAAAAAQAAAAAAAKERKEEQRRKQRDEEGLHLLTLLLQCAEAVNADNLDDAHQTLLEIAELATPFGTSTQRVAAYFAEAMSARLVSSCLGLYAPLPPGSPAAARLHGRVAAAFQVFNGISPFVKFSHFTANQAIQEAFEREERVHIIDLDIMQGLQWPGLFHILASRPGGPPRVRLTGLGASMEALEATGKRLSDFADTLGLPFEFCAVAEKAGNVDPEKLGVTRREAVAVHWLHHSLYDVTGSDSNTLWLIQRLAPKVVTMVEQDLSHSGSFLARFVEAIHYYSALFDSLDASYGEDSPERHVVEQQLLSREIRNVLAVGGPARTGDVKFGSWREKLAQSGFRAASLAGSAAAQASLLLGMFPSDGYTLVEENGALKLGWKDLCLLTASAWRPIQVPPCR

SEQ ID NO: 2566 - protein, 468 aa, Zea mays
MGWGTVVYEGAVVGSSLVGLGWAGLWFLNRRLYKEYEERRVLVQILFGLVFAFSCNLFELVLFEILPVLSKHARFLNWHLDLFCLILLLVFVLPYYHCYLLLRNSGMRRDRAWLVAALFLLVFLYGFWRMGIHFPMPSPEKGFFTMPQLVSRIGVIGVSVMAVLSGFGAVNLPYSYLSLFIREIDETDIKTLERQLMQSIETCTAKKKKIILSQMEMERIQGSEEKLKARSFLKRIVGTVVRSVQEDQTEQDIKNLEAEVQALEELSKQLFLEIYELRQAKIAAAYSRTWRGHLQNLLGYALSVYCVYKMLKSLQSVVFKESGSVDPVTMSITIFLRHFDIGIDVALLSQYISLMFIGMLVVISVRGFLANVMKFFFAVSRVGSGSTTNVVLFLSEIMGMYFISSILLIRKSLANEYRVIITDVLGGDIQFDFYHRWFDAIFVASAFLSLLLISAQYTTRQTDKHPID

SEQ ID NO: 2567 - protein, 568 aa, Zea mays
MAASMASPRGRSIRETVLETVAAYHQQQRAKGKLRKSLTYAGGELSSAGRARGDGPASTSVSSLCGPDDDDEPFWEEEEGTVELVQLGANRAKNVLILMSDTGGGHRASAEAIKDAFRIEFGDEYRVGGCARALSLCSFITRAVLLHHGLSSTADFVITINRLVCQVFVKDLCKDHAGWPLNNMESSYKFMVKHVQLWKVAFHSTSPRWVHNFYLAALASFYAKKVEAGLKKYKPDIIISVHPLMQHIPLWVLKWQGLQNRVVFVTVITDLNTCHPTWYIQLMIRKTYSKAICSLDLTIRRKKRRFHADVNRCYCPSEEVAKRAALDDLQPSQIRVFGLPIRPSFCRAVLVKDDLRRELELDPELPAVLLMGGGEGMGPVKKTARALGESLFDKELGKPIGQLIVICGRNKTLSSSLQAVEWKIPVKVRGFETQMEKWMGACDCIITKAGPGTIAEALIRGLPIILNDFIPGQEVGNVPYVVDNGAGVFSKSPKETASLVARWFGPDSEELKKMSEKALKLAQPEAVFDIVKDMHELSQEQGVISQISSSLTSSFFLPSPESTPLQLI

SEQ ID NO: 2568 - protein, 1358 aa, Zea mays
MGKGAGAAEPSTVVLAVNGKRYEAAGVAPSTSLLEFLRSQTPVRGPKLGCGEGGCGACVVLVSKYDPATDEVTEFSASSCLTLLHSVDRCSVTTSEGIGNTRDGYHPVQQRLSGFHASQCGFCTPGMCMSIFSALVKADNKSDRPDPPAGFSKITTSEAEKAVSGNLCRCTGYRPIVDTCKSFASDVDLEDLGLNCFWKKGEEPAEVSRLPGYNSGAVCTFPEFLKSEIKSTMKQVNDVPIAASGDGWYHPKSIEELHRLFDSSWFDDSSVKIVASNTGSGVYKDQDLYDKYIDIKGIPELSVINKNDKGIELGSVVSISKAIEVLSDGNLVFRKIADHLNKVASPFVRNTATIGGNIMMAQRLPFESDVATVLLAAGSTVTVQVASKRLCFTLEEFLEQPPCDSRTLLLSIFIPEWGSDYVTFETFRAAPRPFGNAVSYVNSAFLARTSGSLLIEDICLAFGAYGVDHAIRAKKVEDFLKGKSLSSFVILEAIKLLKDTVSPSEGTTHHEYRVSLAVSFLFSFLSSLANSSSAPSNIDTPNGSYTHETGSNVDSPERHIKVDSNDLPIRSRQEMVFSDEYKPVGKPIKKVGAEIQASGEAVYVDDIPAPKDCLYGAFIYSTHPHAHVRSINFKSSLASQKVITVITAKDIPSGGENIGSSFLMQGEALFADPIAEFAGQNIGVVIAETQRYANMAAKQAVVEYSTENLQPPILTIEDAIQRNSYIQIPPFLAPKPVGDYNKGMAEADHKILSAEVKLESQYYFYMETQAALAIPDEDNCITIYSSTQMPELTQNLIARCLGIPFHNVRVISRRVGGGFGGKAMKATHTACACALAAFKLRRPVRMYLDRKTDMIMAGGRHPMKAKYSVGFKSDGKITALHLDLGINAGISPDVSPLMPRAIIGALKKYNWGTLEFDTKVCKTNVSSKSAMRAPGDVQGSFIAEAIIEHVASALALDTNTVRRKNLHDFESLEVFYGESAGEASTYSLVSMFDKLALSPEYQHRAAMIEQFNSSNKWKKRGISCVPATYEVNLRPTPGKVSIMNDGSIAVEVGGIEIGQGLWTKVKQMTAFGLGQLCPDGGECLLDKVRVIQADTLSLIQGGMTAGSTTSETSCEAVRQSCVALVERLKPIKESLEAKSNTVEWSALIAQASMASVNLSAQAYWTPDPSFKSYLNYGAGTSEVEVDILTGATTILRSDLVYDCGQSLNPAVDLGQIEGCFVQGIGFFTNEDYKTNSDGLVIHDGTWTYKIPTVDNIPKEFNVEMFNSAPDKKRVLSSKASGEPPLVLAASVHCAMREAIRAARKEFSVSTSPAKSAVTFQMDVPATMPVVKELCGLDVVERYLENVSAASAGPNTAKA

SEQ ID NO: 2569 - protein, 517 aa, Zea mays
MDPSSAGSGGNSLPSVGPDGQKRRVCYFYDPDVGNYYYGQGHPMKPHRIRMTHSLLARYGLLNQMQVYRPNPARDRDLCRFHADDYINFLRSVTPETQQDQIRLLKRFNVGEDCPVFDGLYSFCQTYAGASVGGAVKLNHGHDIAINWSGGLHHAKKCEASGFCYVNDIVLAILELLKHHERVLYVDIDIHHGDGVEEAFYTTDRVMTVSFHKFGDYFPGTGDIRDIGHSKGKYYSLNVPLDDGIDDESYQSLFKPIMGKVMEVFRPGAVVLQCGADSLSGDRLGCFNLSIKGHAECVRYMRSFNVPLLLLGGGGYTIRNVARCWCYETGVALGQEPEDKMPVNEYYEYFGPDYTLHVAPSNMENKNTRQQLDDIRSKLLDNLSKLRHAPSVHFQERVPDTEIPEQDEDQDDPDERHDPDSDMEVDDHKAVEESSRRSILGIKIKREFGENATRVQDGGRVASEHRGLEPMAEDIGSSKQAPQADASAMAIDEPSNVKNEPESSTKLQGQAAAYHKP

SEQ ID NO: 2570 - protein, 454 aa, Zea mays
MDPWSESEGKRAHDPIFKCFSQNQGHHHFMERSTDAAVALSERCRCIWVSGPIIVGAGPSGLAAAACLKEKGISSLILERSRCLASLWQLKTYDRLSLHLPRQFCELPLMPFPADYPIYPSKQQFVAYLESYAASFGICPTYNRTVVCAEYDEQLLLWRVRTQTSDTTGEEVEYVSRWLIVATGENAEAVQPDIGGLQEFPGTIMHTSAYKSGSAFTGKRVLVVGCGNSGMEVCLDLCNHSAEPHIVVRDAVHILPREMLGHSTFGLSMWLLKWLPVHVVDRVLLCIARAMLGDTARLGLKRPASGPLQLKSLSGKTPVLDVGTFAKIKSGDIKVRPAVRQVSGRAVEFADGELEEFDAIVLATGYKSNVPFWLKDRVLFSEKDGLPRKAFPNGWKGEKGLYSVGFTRRGLMGTSVDARRVAHDVEQQWRKAKGTHRDGVPLPLVAVVYHGDGL

SEQ ID NO: 2571 - protein, 264 aa, Zea mays
MELLHAVIHGAATTTTTTTTTTTSSSATVTSGDEGAHLPQGWAKKKRSRRQRSEEENLALCLLMLSRGDRHRVQAPPPPVPSAEFRCSVCGKSFGSYQALGGHKTSHRVKLPTPPAAHVQLPAPPAVALLVEAPAPPPVTATPPPLPLVAVAVAVREPATSSTSDGAAAGRVHRCTICHKEFPTGQALGGHKRKHYDGGAAAAETSEVGSSGNEGSAARAFDLNLPAVPEFAFRCGAKPGKMWDEDQEVQSPLAFKKPRLLMTA

SEQ ID NO: 2572 - protein, 284 aa, Zea mays
MAGGPAAVSFLTNIAKVAAGLGAAASLASASLYTVDGGERAVIFDRFRGVLPETVGEGTHFLVPWLQKPFIFDIRTRPHNFSSNSGTKDLQMVNLTLRLLSRPDVQHLPTIFTSLGLEYDDKVLPSIGNEVLKAVVAQFNADQLLTDRPHVSALVRDALIRRAREFNIILDDVAITHLSYGIEFSLAVEKKQVAQQEAERSKFLVAKAEQERRAAIVRAEGESESARLISEATAMAGTGLIELRRIEAAKEIAAELARSPNVAYIPSGENGKMLLGLNATGFGR

SEQ ID NO: 2573 - protein, 370 aa, Zea mays
MEAATMVWTAAVVGAGLVYWFVWVMGAAEVKGKRAVDLKMGSITRDKVQDKYTQYWSFFRRPKETATTAASAEKVPAFVDTFYNLVTDIYEWGWGQSFHFSPSLPGRSHRDATRVHEERVADLLGARPGHRLLDVGCGVGGPMRAIAAHSGSNVVGITINEYQVNRARAHNRKAGLDSPRCEVVCGNFLSMPFPDASFDGAYSIEATCHAPRLQDVYGEVYRVLKPGGLYVSYEWVTTPLYRAEDPDHVECIHGIERGDALPGLRRQDEIASIAKEVGFEVLKEQDLALPPALPWWTRLKMGRIAYWRNSLVVRVLTMLRVAPKGVSEVHEMLYETAQHLTRGGETGIFTPMHMVLLRKPAAAASTEEAN

SEQ ID NO: 2574 - protein, 470 aa, Zea mays
MQLDLNVAEAPPPVEMEASDSGSSVLNASEAASAGGAPAPAEEGSSSTPAVLEFSILIRSDSDAAGADEDEDATPSPPPRHRHQHQQQLVTRELFPAGAGPPAPTPRHWAELGFFRADLQQQQAPGPRIVPHPHAAPPPAKKSRRGPRSRSSQYRGVTFYRRTGRWESHIWDCGKQVYLGGFDTAHAAARAYDRAAIKFRGVDADINFNLSDYEDDMKQMGSLSKEEFVHVLRRQSTGFSRGSSRYRGVTLHKCGRWEARMGQFLGKKYIYLGLFDSEVEAARAYDKAAIKCNGREAVTNFEPSTYHGELPTEVADVDLNLSISQPSPQRDKNSCLGLQLHHGPFEGSELKKTKIDDAPSELPGRPRQLSPLVAEHPPAWPAQPPHPFFVFTNHEMSASGDLHRRPAGAVPSWAWQVAAAAPPPAALPSSAAASSGFSNTATTAATTAPSASSLRYCPPPPPPSSHHHPR

SEQ ID NO: 2575 - protein, 1400 aa, Zea mays
MPPGGRRGAKQRPNWTREPQLGDLVLAKIKGYPRWPAKISRPEEFNHEPTPKKFFVYFYGTDEIAFVPLADLEEFTEKTKNDLLDRAPNMKVKRKYVQVFNDAVEQICKAYNELPKTSEAANGALPDQSEKPSEHLVRSQDVGEIPGLGQMEGDSPTDYSHTSAKRPGTEEDVKDDGHEICDHSLAVYQKKTSLLEDPKHPMTKKSAASKSSLDIYMEQEHSPTSVRAEREAEEVKIEKESCPLDGFILEPNLEVVCALEVPKKSKSNKPLRNAERKENKRAGIGSPIERIVAEAASDVVLNMSADKESREFKKSKIMTKQSLTTDSEKMDYNKIVHGGPDEQLTGKSSAGFSSNKKSLPDSGQHKMDSSADTRPGKKPRLMDRAGETDKTVDKSEMKSNIDYGKHYAVKHERPTSMETCKNTILKTSTSDDRALRSGGVVSPISRLHSEVMEPACGSVTLSTVADSVKKGSSMKEDASRVDRQLVKPKRRACRFDEDEDEGQRTPLHRTSAKSLSTHIVPTEKAGIRGKFSSHVGNVFGKKLGPAREEKSRSVRMSPVKHEPIFSSPSQDKVHARHQVVEKRLITGLVETPAVIGNKMSLVDGKSSAQVKMPASSEVKKLRSSSSKPSHLTSGNSHSRNYPAPEKIPLLPQPEETKAKSKLATSVEHKVGTTLSTEQSGKRDHLKEERSSYVDKAVSSEPNPGSAKSIKHLIAAAQARRNLMASVHAKFDGSSTDNADITSTPYGLPGLSPSPVFRIPSPPRIAFPGSPGQRILKSPIEFDNGHGKSPKSRQASGSPSGGTDAAIARDALEGMIETLSRTKDSIGRATRHAIECSKYGIAGEIVELLIQKLQSEPNFHRRIDLLFLVDSITQCSHSQRGVARASYVPTVQAALPRLLGAAAPPGAGARENRRQCLKVLRLWLERKIMPEDILRKYMGDIEVPNDDTSTTLMLKRPSRAERSVDDPIREMDDMLVDEYGSNATFELSGILSSKVFEDDEDFPKNNGSSPFVSQARPVENDVIRKTEDTIAPVYVEEHIIIVENVTTDAAMEDALELPGNKQQTDGAVLIEHDSIQDPGSEQAIDQNDFPSLPDGPPPLPSDSPPPPPPLPPSPPPVTPPPPPPPPLSPASPPPPPPPPLPSGPPPQPAPPPLATQVTPLPSIPPPVPSSPPSLSYQPPAPEYFVTANGDQLTQMTGNILIQAIGNATTFIPSGPVNGQAAVNFVTSMQAEYGNNNIFMAPQASNGNYQFRPTGVPFQQGNFSAFPSAQTHPVQPHSHMAHMNPMGQQAVPPTLNPYAVQSFPNSQSHYPSEEHWRMASGNFSPDGQHNWLAGGGALPCSEGPYVQDGYSRSNIDRSSINPMNHQHTVLNHLPYGAPLPGHVPQMLPARSDVHTLNCWRPS

SEQ ID NO: 2576 - protein, 615 aa, Zea mays
MARWGTPTVGQEEEIIGPGPAPAKQRRKRPLQFEQAFLDALPSAAMYEKSYMHRDVVTHVAVSPADFFITGSADGHLKFWKKKPVGVEFAKHFRSHLSPIEGLAVSVDGLLCCTISNDRSVKIYDVVNYDMMFMIRLSFVPGAIEWVHREGDVKPKLAVSDRNTPFVHIFDTHSGSNDPIMSKEIHGGPVKVMKYNHIHDVVISADAKGLLEYWSPSTLMFPENEVRFRLKSDTNLFEIAKCKTTVSAIEVSNDGTQFAVTSPDRRIRVFWFKTGKLRRVYDESLDVAQDLQRSDVPLYHLDAIDFGRRMAVEKEIEKTENVPQPNAVFDESCNFLIYATLLGVKIVNLHTNKVSRILGKVENNERFLRIALYQGDKGNKKVRKIPSVAANVNDSKEPLSDPTLLCCAFKKHRIYLFSRREPEEPEDATKGRDVFNEKPPPEELLSASDLGKTATTSLPDNLVLHTSMGDIHLRLYPEECPKTVENFTTHCRNGYYDNLIFHRVIKGFMIQTGDPLGDGTGGQSIWGTEFEDEFHKSLRHDRPFTLSMANAGPNTNGSQFFFTTVATPWLDNKHTVFGRVVKGMDVVQQIEKVKTDKNDKPYQDVKILNVTVPKT

SEQ ID NO: 2577 - protein, 187 aa, Zea mays
MAAQEQEHEKQQAKTSTTSSLPSSSERSSSSAPNNLREGGVESDEEIRRVPELGGASASASASSGAGKEDGARAVAAGAQGHPPAAGKKRGRAPGDKEQNRLKRLLRNRVSAQQARERKKAYLTELEARAKDLELRNAELEQRVSTLQNENNTLRQILKNTTAHASKRSGGGGKGGDGGKKHHFAKS

SEQ ID NO: 2578 - protein, 803 aa, Zea mays
MSFGSLFDGGSGGGGGGGGMQFPFSTGFSSSPALSLGLENPGGGMVGRMLPVGGAPAAGGMARDAADAENDSRSGSDHLDAMSAGAGAEDEDDAEPGNPRKRKKRYHRHTPQQIQELEALFKECPHPDEKQRGELSKRLGLDPRQVKFWFQNRRTQMKTQLERHENALLKQENDKLRAENMAIREAMRSPMCGSCGSPAMLGEVSLEEQHLCIENARLKDELNRVYALATKFLGKPMPVLSGPMLQPNLSLPMPSSSLELAVGGLRGLGSIPSLDEFAGGVSSPLGTVITPARATGSAPPPMVGVDRSMLLELAISAMDELVKLAQVDEPLWLPSLSGSPDKKLLNFEEYAHSFSPSVGAVKPVGYVSEASRESGLVIIDNSLALVETLMDVRRWSDMFSCMIAKATVLEEVTSGIAGSRNGALLLMKAELQVLSPLVPIREVTFLRFCKQLAEGAWAVVDVSIDGLVRDHNSGTASNAGNIRCRRLPSGCVMQDTPNGYCKVTWVEYTEYDEASVHQLYRPLIRSGLAFGARRWLAMLQRQCECLAILMSPDTVSANDSSVITQEGKRSMLKLARRMTENFCAGVSASSAREWSKLDGAAGSIGEDVRVMARKSVDEPGEPPGVVLSAATSVWVPVAPEKLFNFLRDEQLRAEWDILSNGGPMQEMANIAKGQEHGNSVSLLRASAMSANQSSMLILQETCTDASGSMVVYAPVDIPAMQLVMNGGDSTYVALLPSGFAILPDGPSSVGAEHKTGGSLLTVAFQILVNSQPTAKLTVESVETVNNLIFCTIKKIKTALQCDA

SEQ ID NO: 2579 - protein, 815 aa, Zea mays
MYVVKRDGRQETVHFDKITARLKKLSYGLSQDHCDPVLVAQKVCAGVYKGVTTSQLDELAAETAAAMTASHPDYASLAARIAVSNLHKNTKKSFSETIKDMYMHFNKRSGLMAPLVAEDVYEIIMKNAARLDSEIIYDRDFDYDYFGFKTLERSYLLKLDGKVVERPQHMLMRVSLGIHKEDIESAIRTYHLMSQRWFTHASPTLFNAGTPRPQLSSCFLICMKDDSIEGIYETLKECAVISKSAGGIGVSVHNIRATGSYIRGTNGSSNGIVPMLRVFNDTARYVDQGGGKRKGAFAVYLEPWHADIFEFLDLRKNHGKEENRARDLFYALWVPDLFMQRVQNNGEWSLFCPNEAPGLADSWGEEFDNLYKKYESQGKAKKVVPAQTLWFDILKAQIETGTPYMLYKDTCNRKSNQQNLGTIKSSNLCTEIIEFTSPTETAVCNLASIALPRFVREKDVPLESHPSKLVGSSDSKNRYFDFEKLAEVTSTVTYNLNKIIDINYYPVETAKRSNMRHRPIGIGVQGLADTFILLGMPFDSPEAQQLNKDIFETIYYHALKASAELAAKEGPYETYEGSPVSKGILQPDMWDVVPSNRWNWPSLRETISKVGIRNSLLVAPMPTASTSQILGNNECFEPYTSNIYSRRVLSGEFVVVNKHLLHDLTEMGIWTPTLKNQIIYDDGSVQKIAEIPDDLKAIYKTVWEIKQKTLVDMAVDRGCYIDQSQSLNVHMEQANFGKLTSLHFHAWSKGLKTGMYYLRTRAAADAIKFTVDTTLLKENGNGVSDGKPAEEDVDAKMAQMVCSLNNREECLACGS

SEQ ID NO: 2580 - protein, 677 aa, Zea mays
MAEAGVARGSGSAGDALFRELWHACAGPLVTVPRQGELVYYFPQGHMEQLEASTDQQLDQHLPLFNLPHKILCKVVNVELRAETDSDEVYAQIMLQPQTEQSEPTSPDPEPPEPERCNIHSFCKTLTASDTSTHGGFSVLRRHAEECLPQLDMTQNPPWQELVAKDLHGNEWHFRHIFRGQPRRHLLTTGWSVFVSSKRLVAGDAFIFLRGENGELRVGVRRLMRQLNNMPSSVISSHSMHLGVLATASHAISTGTLFSVFYKPRTSRSEFVVSVNKYLEAKNHKMSVGMRFKMRFEGDESPERRFSGTIIGMGCMPANSTSPWANSEWRSLKVQWDEPSAILRPDRVSPWEVEPLDRTNPQPPQPPLRNKRARPPASPSIAPELAPVFGFWKSPAEPAQAFSFSGLQRTQELYHSSPSSMFSSSLNVGFNPKYEGPTPNTNHLYWTMRETRTESYSASINKAPTEKKQESTTSGCRLFGIEIGSSAVSPVVTVASVGHDPPPPALSVDAESDQLSQPSHANKATDAPAASSDRSPNETESRQARSCTKVIMQGVAVGRAVDLTRLDGYDDLRRKLEEMFDIPGELSASLKKWKVIYTDDEDDMMLVGDDPWSEFCRMVKRIYIYSYEEAKSLTPKAKLPAIGGDTGVKPDPSKLPPESDVPQSDSDNSAPVAADKD

SEQ ID NO: 2581 - protein, 928 aa, Zea mays
MEQRDATQPEAAAEERDQERPSIIPPPKENEDKDLKLPSRVVSLLFGGDISTSAQTFEKWLSLVRKRSGAFRPSGFPHRGSRIEVMPSGSFSLFGSGDLSEHLIREAPTRKDPLDCDQSPEISLWERLGNSSALDIESSEFSWDVLLSLHHTEHSSSSEQTEDEMNKALEVTVNSGGVVFFALFSSPGNIGVPEAAAVIKFSSSKMATQAERLGYEFARLLGVHTPQARVVYNSSSEWLAIRHAAENARTVAVSNNDEVGEMTCSELLEALELSRCLLLMSYIHGSPLLESSKAFHSREAACVTASSLGRVLMLDLILRNEDRLPCRQLGWRGNPANLMISDKSSLPNLDRLDDFKSSTDSSNQLITHFLHREKRSHSLNGKFGSPGLDPMSPKLEPLINEKENAERTNGDFRIVAIDTGVPRRPPVGRRVKDHERYPKVVELILNSSDYSASILYEISGCKLGHPRPDEVTSSDSCCSLSDEDNAGVIHEFRGSFRAALRDLEGFHLFLLQLYQKLDGVLRVFLSIITKTSEESDNNDAALSDFPSPGASYSTPRLPSKHLNNELHSDSEMLKSAMKSSSVGSRGSSDSVSPLPRESWNNKSFKGSAEAPRSLRMTMKLRDFYKTPKVDPELLKEIEQWNEALKNDVIKFCQENNFHSGFFDGTENNMVADAYELKVRLEHIIERIALISDAANTERPSLVVNNLFIGGALAARSKYTLQHLGITHVLCLCSNEIGQSDSQFPDLFEYKNFSISDDDDANISDLFEEASDFIDHVDHVGGKVLVHCFEGKSRSATVVLAYLMLREGFTLAKAWNLLKKVHRRAQPNDGFAKALLALDKRLHGKVSMDWQHKRPEMKVCPICSKNVGLSTSSLKLHLQKAHKRLSAGSVDSAMTMEIQKSIESLQISRGGSLSPSQKLTKVFSNELSF

SEQ ID NO: 2582 - protein, 672 aa, Zea mays
MAHARGGGGHGHGHEEEAEAAVCLDGDSEAGEARSAGRAPPWRDQLTARGMVASLAVGAMYSVIVMKLGLTTGLVPTLNVSAALIAFVILRGWTQALARFGVATRPFTRQENTVVQTCAVACYSIAVGGGFGSFLLALNKRTYEMAGEDTEGNLPGSYKEPGIGWMTGFLFAVSFVGIVALIPLRKIMIIDYKLTYPSGTATAVLINGFHTTHGDATAKQQVNGFTKYFAISFFWSFFQWFYSGGDNCGFSQFPTFGLRAWKQTFFFDFSLTYVGAGMICSHLVNLSLLLGALLSWGIMWPLVSDLKGDWYPADMPESSMRSLQGYKAFICIALLLGDGLYNFVKVVAFTVKSLLGRSRLKNAKKEEDIPVLDEIQRNEIFTRDSIPTWLAYSGYLALSAVAVFAIPLMFHEMKWYYVIIAYLLAPALGFCNAYGAGLTDINMAYNYGKVALFILAAWAGKDSGVVAGLVGCGLVKSLVSISADLMHDFKTGHLTLTSPRSMIIAQAIGTAMGCVIGPLTFLLFYKAFDIGNPDGYWKAPYALIYRNMAILGVQGFSALPLHCLQLCYGFFGFAVAANLMRDLLPPKYGKWVPLPMAMGVPFLVGASFAIDMCVGSLMVFIWHIIDRSKASLMVPAVASGLICGDGLWIFPESLLALAKISPPLCMAFRSSH

SEQ ID NO: 2583 - protein, 665 aa, Zea mays
MASDPPGDGTSGEETAPGPAPAVEAPPAPAVPARSRWAAEIKVYTRKHPRKNPKPPPESAADPVSVPSPAPNPLSETLSSIRRSIHRTEAVDAAALSDPAAPASVPTRAPSGERGAASGDPSSGLNRVGGGIPNGHGDDRAAAAAVKAEKARKRRLRSELRRCLAGELDQVRVLSRRLKEAAEALAQQEASEPVPLPLMVLPTQQQVVDAGYVQHQFLAGDMAVPMPTQIAAAVTPARSLLHRRPLTVSVVHNEAFEKEKRTPKANQLYQNSEFLLAKDRIPPSDSHVRKKPKHHKKKHRSLESRGADFDAERRLYSHAFKKSSSLLSRLMKHKFGWVFNKPVDPVTLGLHDYFTIIKHPMDLGTIRGRLSRGQYRNPKEFAEDVRLTFHNAMTYNPKGQDVHFMAEQLLGIFEAQWPEIEAEVNYLASCPPLPKKFPPPPIDLRFLERSDSMRHHVALDTNSRPISHTPTYTRTPSMKKPRAKDPNKRDMTIDEKRKLSENLQNLPPVKLDAVVQVIKNKNLSVKQHDDEIEVEIDSMDAETLWELDRFVSNYKKNLSKQKRKAERAMLARQDAELRAQHPIQQPQPTPVPQEPFGEKSPKQVVKDSLEGEQLPASAPEQNGENRQNASSSSNSSSSSSGSGSSSSGSDSDSSSSDGSDAGNSS

SEQ ID NO: 2584 - protein, 575 aa, Zea mays
MTYFPEEVVEHIFSFLPSHSDRNTVSLVCKVWYEVERLSRRAVFVGNCYAVRPERVVLRFPNIKALTVKGKPHFADFNLVPPDWGGYAGPWIDAAARSCVGLEELRMKRMVVFDENLELLARSFLRFKVLVLISCEGFSTDGLAAIASHCKLLRELDLQENDVEDRGPRWLSFPDSCTSLVSLNFACIKGEVNSGALERLVARSPNLRSLRLNRSVSVDTLSKILLRAPNLEDLGTGNLTDEFQAESYSRLTSALEKCKKLRSLSGFWDASPICVPYIYPLCHQLTGLNLSYTPTLDYSDLAKMVSRCVKLQRLWVLDCISDKGLQVVASSCKDLQELRVFPSEFYVPGASAVTEEGLVAISSGCPKLTSLLYFCHQMTNEALITVANNCPNFIRFRLCILEPKKPDAMTGQPLDEGFGAIVRECKGLRRLSISGLLTDKVFMYIGKHAKYLEMLSIAFAGDSDKGMMDVMNGCKNLRKLEIRDSPFGDVALLGNVAKYETMRSLWMSSCNVTLKGCQVLASKMPMLNVEIMNELDGSSEMENHGDLSKVDKLYVYRTTAGARDDAPNFVKILQS

SEQ ID NO: 2585 - protein, 240 aa, Zea mays
MGRGKIVIRRIDNSTSRQVTFSKRRNGIFKKAKELAILCDAEVGLVIFSSTGRLYEYSSTSMKSVIDRYGKAKEEQQVVANPNSELKFWQREAASLRQQLHNLQENYRQLTGDDLSGLNVKELQSLENQLETSLRGVRAKKDHLLIDEIHDLNRKASLFHQENTDLYNKINLIRQENDELHKKIYETEGPSGVNRESPTPFNFAVVETRDVPVQLELSTLPQQNNIEPSTAPKLGLQLIP

SEQ ID NO: 2586 - protein, 625 aa, Zea mays
MTSAGDPISILIPDTQARPRNPRACMLPADAYLRFVFMAAAAYCCECDVQAAAGTVLQSSGEAIVAGAMGGGVHHHHPCVAADGDGAGAGPGPASVEAALRPLVGVDAWDYCVYWRLSPDQRFLEMAGFCCSSQFEAQLPALGDLPPSIQLDSSSAGMHAEAMVSNQPIWQSSRVPELQTGYSSGMVQEPGSSGGPRTRLLVPVAGGLVELFAARYMAEEEQMAELVMAQCGVPSGGEGGAWPPGFAWDGGASDASRGMYGDAVPPSLSLFDAAGSVAADPFQAVQQAPGAGGGGVDDVAGWQYAAAAGSELEAVQLQQEQQPRDADSGSEVSDMQGDPEDDGDGDAQGRGGGKGGGKRQQCKNLEAERKRRKKLNERLYKLRSLVPNISKMDRAAILGDAIDYIVGLQNQVKALQDELEDPADGAGAPDVLLDHPPPASLVGLENDESPPTSHQHPLAGTKRARAAAEEEEEEKGNDMEPQVEVRQVEANEFFLQMLCERRPGRFVQIMDSIADLGLEVTNVNVTSHESLVLNVFRAARRDNEVAVQADRLRDSLLEVMREPYGVWSSSAPPVGMSGSGIADVKHDSVDMKLDGIIDGQAAPSVAVGVSEDHYGGYNHLLQYLA

SEQ ID NO: 2587 - protein, 961 aa, Zea mays
MAMAAAAAAATKRCMNPACGAPASVLGAGGDWRKGWPLRSGCFALLCDKCGLAYEQFVFCDIFHQKESGWRDCSFCGKRLHCGCVASKNSYDLLDSGGVHCVTCMKNSLAQSASGQVVPKLFPSPINLRFFGKSDELLSSRNFEQPPSLTLDSRNDDIAFVNKSNHLFMVKGIEAGQSSNILRQKEIENGSRQIKWEQPTLSFGDMGRPFLTRSQSALESPQCTRRDDNKDPTTDSTSESFSEACLSMSLGIANNVNRMEATSTAERPVLLSTTAIAEGRELATTLSPFQHAQRARHFLTRPPRIGEGAAFDPTRDMFPHLRVARPPADGRGRNQLLPRYWPRITDQELQQISGDSNSTIVPLFEKVLSASDAGRIGRLVLPKACAEAYFPPISQPEGRPLTIQDARGKEWHFQFRFWPNNNSRMYVLEGVTPCIQSLQLQAGDTVTFSRIDPGGKLVMGFRKATNTVSLPDSQISAIANGSLLSETLFSTANENIGVVSGYPGFLHSIKGAADLHPNSLYDHHMNLVDGDVSWNKADKFGSRPDEGSLQFLQKRSHNIGSKSRRFLIDAEDAMELKLTWEEAQELLRPAPTAKPTVVMIEDYEFEEYDEPPVFAKRSIFTIRATGEQDQWIQCDDCSKWRRLPLNVIVAPKWTCTDNSWDSKCCSCSAPEELTPRELQSVLQQYEEMRRRKGSYGLKLNVAEMDASSLDAFATAAVFGEVGNQGSASVATTTKHPRHRPGCTCIVCIQPPSGKGPKHSPACTCNVCMTVRRRFKTLMMRKKQRQSEREEAEAGKKIAWVNRDEPEGSSLSRSPQTLDSTRDNSDVTATMLDKVSDVNKQGHIDVDLNLHPAAPAVQAAQQQPRPVSMMGLLEVAGRPLDNYMKQNGLTSLVGEQGGGSSSTATVPPPALVESEERTSNEGLVPSASAEREPNAMAVDEAGENQQDKAADDDDDAVAAAAT

SEQ ID NO: 2588 - protein, 1264 aa, Zea mays
MAEGDAGKAEAGSCSAAAASGAGGCDAVKKRPEQSVAFHELFGFADPLDWLLMAAGSAGAVVHGAAMPVFFLLFGELVNGFGKNQHNLRRMTDEVSKYSLYFVYLGLVVCASSYLEIACWMYTGERQVGALRRRYLEAVLRQDVGFFDTDARTGDVVFSVSTDTLLVQDAIGEKVGNFIHYLATFLAGLVVGFVSAWRLALLSIAVIPGIAFAGGLYAYTLTGLTSKSRDSYANAGIIAEQAIAQVRTVYSYVGETKALNSYSEAIQNTLKLGYKAGMAKGLGIGCTYGIACMSWALVFWYAGVFIRNGQTDGGKAFTAIFSAIVGGLSLGQSFSNLGAFSKGKIAGYKLLEVIRQRPTIVQDTADGRCLDEVHGNIEFKEVAFSYPSRPDVMIFRDFSLFFPAGKTAAVVGGSGSGKSTVVALIERFYDPNQGQVLLDNVDIKTLQLKWLRDQIGLVNQEPALFATTILENILYGKPDATMAEVEAAATSANAHSFIALLPNGYNTHVGDRGLQLSGGQKQRIAIARAMLKNPKLLLLDEATSALDAGSESIVQEALDRLMVGRTTVVVAHRLSTIRCVDMIAVIQQGQVVETGTHDELLAKGSSGAYAALIRFQETARNRACPSTRKSRSSRLSNSLSTRSLSLRSGSLRNLSYSYSTGADGRIEMVSNADNDRKYPAPRGYFFKLLKLNAPEWPYTILGAVGSVLSGFIGPTFAIVMSNMIEVFYYRNPSKMESKTREYVFIYIGTGLYAVVAYLVQHYFFSIMGENLTTRVRRMMLAVILRNDVGWFDQEENNSNLVAARLSTDAADVKSAIAERISVILQNMTSLLVSFVVGFIIEWRVALLILVTFPLLVLANFAQQLSMKGFAGDTAKAHAKTSMIAGEGVSNIRTVAAFNAQDKILSLFCSELRVPQMHSLRRSQISGALFGLSQLSLYASEALILWFGAHLVRTHVSTFSKVIKVFVVLVITANSVAETVSLAPEIVRGGESIRSVFSVLNSRTRIDPDDPDAEQVESVRGEIDFRHVDFAYPTRPDVMVFKDLSLRIRAGQSQALVGASGSGKSTVIALVERFYDPLAGKVMIDGKDIRRLNLKSLRLRIGLVQQEPVLFATSILENIAYGRDGATEEEVVEAAKVANVHGFVSALPDGYRTPVGERGVQLSGGQKQRIAIARAVLKDPAVLLLDEATSALDAESECVLQEALERIMKGRTAVLVAHRLSTIRGVDSIAVVQDGRVVEQGSHGDLVSRPDGAYSRLLQLQLHHG

SEQ ID NO: 2589 - protein, 412 aa, Zea mays
MAAMPGGAHGAGAADPMQVDQPLPPAAAGTAHAPADAKHAGSMIEGSDPVTGHIISTTIGGKNGEPKRTISYMAERVVGTGSFGIVFQAKCLETGETVAIKKVLQDKRYKNRELQIMRSMDHCNVVSLKHCFFSTTSRDELFLNLVMEFVPESLYRVLKHYSNMNQRMPLIYVKLYTYQIFRGLAYIHTVPGVCHRDVKPQNLLVDPLTHQVKICDFGSAKMLVKGEANISYICSRYYRAPELIFGATEYTTSIDIWSAGCVLAELLLGQPLFPGESAVDQLVEIIKVLGTPTREEIRCMNPNYTEFRFPQIKAHPWHKIFHKRMPPEAIDLASRLLQYSPNLRCTALEACAHPFFDDLREPHARLPNGRPFPPLFNFKQELANASPELINRLIPDHARRHLGLTLLPATGP

SEQ ID NO: 2590 - protein, 511 aa, Zea mays
MELDLNVAEVAPEKPSAALEASDSGSSGSSVLNAEAASAGGGGPAPGEEGSSSTPAVLEFSILRSDSDAAGADADDGDATPSPPRHHQQQLVTRELFPAPQHWAELGFFRAGPQQQPDIRVLPHPHPYPPPPPPAQPQQAKKSRRGPRSRSSQYRGVTFYRRTGRWESHIWDCGKQVYLGGFDTAHAAARAYDRAAIKFRGVDADINFNLSDYDDDMKQMKSLSKEEFVHALRRQSTGFSRGSSKYRGVTLHKCGRWEARMGQFLGKKYIYLGLFDSEVEAARVEYRLDIRFSLPFRDPRAYDKAAIKCNGREAVTNFEPSTYDGELLLTAEASAEVADDVDLNLSISQPASSQSPKRDKNCLGPQLHHHHGRPFDGSAVLKKTKIDAPSELSSAGRPHRSFLPHLVAAEHLPPRSHPFFITHHESDASRRDPSWAAAAAWKVTAAAPPPPTTTLLPLPLPSTSSAAASSGFSNTATTAAAAPSAASSRRFDPPPPSSSSSSSHHHHHHRR

SEQ ID NO: 2591 - protein, 213 aa, Zea mays
MASGGASSLALAALLLVSCASAAVATKYTVGDASGWTTTGDYATWASGKKFKVGDSLEFKYAGGAHTVDEVSAADYAACSSSNALSTDSAGATTVTLKTAGKHYFICGVAGHCSSGMKLVVDVAKAVAAPAPAPAAAAAPAPAADTAPDAPDTTPSTPTSPSSSGGRTPKSPDTTVLSPPDKKSTSSGATGLSAAAWAGLGLAGLVAVHLGAF

SEQ ID NO: 2592 - protein, 445 aa, Zea mays
MAEPAAAGRKTRVGPYEVGKTIGEGSFAKVKHAHDSRTGAVRAIKVLDRSHVLRHKMVEQIKREISTLKLIKHPNVVQLHEVMASRTKIYMVLEFVDGGELFDKIVNSGRLGEDEARIYFHQLINAVDYCHSRGVYHRDLKPENLLLDSHGTLKVSDFGLSAFAPQTKEDGLLHTACGTPNYVAPEVLADKGYDGMAADVWSCGIILFVLMAGYLPFDDANLMRLYKLICHATFSCPPWFSSGARKFIKRILDPNPDTRIKIAEILEDEWFKKGYKPPHFEQGEDVNLDDVDAAFNDSEDRLVAEKREKPESMNAFALISRSQGFNLGNLFEKEMMGMVKRETSFTSQCTAQEIMSKIEDACGPLGFNVRKQNYKMKLKGDKSGRKGHLSVATEVFEVAPSLHMVELRKTGGDTLEFHNFYKNFSSELKDIVWKAESDASMKQTK

SEQ ID NO: 2593 - protein, 796 aa, Zea mays
MLAESLGRLGFFFLQRDSWKTTLLLAYQSLGVVYGDLSISPLYVYKSTFAEDIQHSETNEEIFGVLSFVFWTLTLIPLVKYVSVVLRADDNGEGGTFALYSLICRHANVSLLPNRQIADEELSTYKLECPPEITDKSRIKVWLERHRKLRVALLVMVMIGTCMVIGDGVLTPAISVFSAVSGLEFSLSKDHREYAVIPITCVILAFLFALQHYGTHRVGFLFAPIVLAWLFCMSALGLYNIIHWNPQIYQALNPSYMFKFLKKTRKYGWMSLGGILLCMTGSEAMFADLGHFSYSAIQLAFTCLVYPALILAYMGQAAYLSKHHDFYSSSQVGFYIAVPDKIRWPVLILAILASVVGSQAIISGTFSIINQSLSLSCFPRVKVVHTSEKIHGQIYIPEINWLLMILCIAVTVGFRDTKHMGNASGLAVITVMLVTTFLTSLVIVLCWHRPPLLALAFLLFFGSIEALYFSASLIKFLEGAWLPILLALILMAVMLIWHYTTIKKYEFDLHNKVTLEWLLALGDRLGMVRVPGIGLVYTDLTSGVPANFSRFVTNLPAFHQVLVFVCVKSVPVPYVFPAERYLIGRVGPPGHRSYRCIVRYGYRDVHQDVDSFETELVETLATFITLDASYRCSEASERELELDPGEQERRLTVIASNPLRRRASYDLQDSVQHSAASTVEVRATAADSLSPRDAEISSAAGPKQVRFFIDSHVVSPEAAENKQVADELEALAAAREAGTAFILGHSHVQCKPGSSVLKRLAVDVGYNFLRRNCRGPDVALRVPPASLLEVGMVYVL

SEQ ID NO: 2594 - protein, 647 aa, Zea mays
MRRGATKDDAAPDKVMGPLFPRLHVNDTLKGGPRAPPRNKMALYEQFSVPSHRYSAAVPPAPSPAPPWGAQRPASAVPSTSASQVGGGDRPIFPLFRVPSTEPVRSSDQTNANSNGQGANGTIAESGRQRQSTHLKSKDTNAAGPPAEGNNSVGKKLANDDDFTVPSVLYSGMPPHSSQEKLTLFPTTSPCKSVPAKYSSTDKRRLEGMDASDVKSKGPSGIKEKEPVQVRIDLEDKETTPSFQVLNDKTWSPDPKLSSHMDRLKKQHAEAESYQIRTRNENAVETQSPPKNGVSLLSKPYVDRREQNGDSDLLGHGLRETGVKRKRSHHDVEQNDDLSDSSVESLPGMEISPDDVVSAIGPKHFWKARRAIVNQQRVFAVQVFELHRLIKVQKLIAASPHVLIEGDPCLGKSLAVSKKRLAGDVETQLESAKNDDGVRPTQLEHSKEKTEANQPSPSQDEQAATNGDVAASMHTPSDNKQKSWCIPAPPSQWLIPVMSPSEGLVYKPYTGHCPPVGSLLAPPFFASYPTSSSSTAGGDFMSSACGARLMSAPVYFPSFSMPAVSGSAVEQVSHVAASQHKRNSCSEAVLASRDSEVQGSSASSPASSETAAQPRVIRVVPHTARTASESAARIFRSIQMERKQNDP

SEQ ID NO: 2595 - protein, 840 aa, Zea mays
MAAAVAMRGGSSDSGGFDKVPGMDSGKYVRYTPEQVEVLERLYIDCPKPSSSRRQQLLRECPILSNIEPKQIKVWFQNRRCRDKQRKESSRLQAVNRKLTAMNKLLMEENERLQKQVSQLVHENAHMRQQLQNTSLANDTSCESNVTAPPNAIRDASNPSGLLAIAEETFTEFLSKATGTAIDWVQMPGMKPGPDSVGIVAISHGCRGVAARACGLVNLEPTKVIEILKDRPSWFRDCRSLEVFTMFPAGNGGTIELIYMQMYAPTTLVPARDFWTLRYTTTMEDGSLVVCERSLTGSGGGPNAASAQQFVRAEMLPSGYLVRPCEGGGSIVHIVDHLDLEAWSVPEVLRPLYESSRVVAQKMTTVALRHLRQIAQETSGEVVYALGRQPAVLRTFSQRLSRGFNDAISGFNDDGWSVMGGDGIEDVVVACNSTKKIRNNSNAGITFGAPGGIICAKASMLLQSVPPAVLVRFLREHRSEWADYNIDAYLASSLKTSACSLPGLRPMRFSGGQMIMPLAHTVENEEILEVVRLEGQPLTHDEALLSRDIHLLQLCTGIDEKSVGSSFQLVFAPIDEHFPDDAPLISSGFRVIPLDMKTDGVSSGRTLDLASSLDVGSAAPQASGDAPPDDCNLRSVLTIAFQFPYEMHLQDSVATMARQYVRSVVSAVQRVSMAISPSQSGLNAGQRMLSGFPEAATLARWVCQSYHYHLGVELLNQSDEAGEALLKMLWHHPDAVLCCSFKEKPMFTFANKAGLDMLETSLIALQDLTLDKIFDESGRKAIFSDISKLMEQGYAYLPSGVCMSGMGRHVSFDQAVAWKVLGEDSSVHCLAFCFVNWSFV

SEQ ID NO: 2596 - protein, 754 aa, Zea mays
MRWLLLLAFAAAPAAGEMGYAHCGCDGSGGAGGGSGFWSLDNIFKWQKVSDLLIAAAYFSIPLEILYFVAGLRHLLPFRWVLVQFGAFIVLCGLTHLLAAFTYEPHPFMVVLLLTAAKFLTALVSFLTAITLLTLIPQLLRVKVRESLLWIKARELDREVVLMKRQEEASWHVRMLTQEIRRSLDRHTVLYTTLIELSRVLALDNCAVWMPSEDKSGMCLTHELRRGSDDGEAVVGADDADVLEVKGADGVKLLPPGSVLGSASGGGKEGTGTVAAIRMPMLRVADFKGGTPQVIKASYAVLVLVPPSGRKWAPHELEIVEVVADQVAVALSHASLLEESQAMRDRLAEQNRELLQARRDALMANEARDAFQRVMSQGMRRPIHSVQGLVSVVQEEEGLASEQRLVVDAVARTATVVSTLINDVMEMSAATSQERFPLETRPFRLRSMVRDAACVARCLCDLSGRFGFAVHVENVLPDLVIGDERRIFHVLLHMVGNLIGRVDEGDVTFRVRADDEATEDQRWDPWRPSYSGGHSSVRFVVGVKRQQNAGDSLPRFLRRPRTHDGLDLRLSFSMCRKLVQTMQGNIWAVLDGQGLPESMTLVLRFQLQPSLASSNLLGGSFDQEHYSSLPSNQIAGLKVLLIDDDEINLVVARKLLERLGCTVSSGSGLMDSSSACASFQLVMVNLEMSAIDPLDAASRIRQQYRSSHWPLVMAMTSEQNVWEKCAQSGINGVLKKPLVLLEVKEELERILQNT

SEQ ID NO: 2597 - protein, 529 aa, Zea mays
MPAPTAEPALPAAFLCVPSPLLSTPLPGAALSASPAPSSHHASFLPRPRGGPRALSVAISVPGPTFSVASRLHQMWGEFARFVRLHGNQIAPLGFASMGLGFGGGGGDNVGGGGGGGGGDVDGVGEVEEAAARAEAPKKVLILMSDTGGGHRASAEAIKAAFTQEFGDDYQVFVTDLWTDHTPWPFNQLPRSYSFLVKHGPLWKMTYYGTAPRVVHQPHFAATSTFIAREVAKGLMKYQPDVIISVHPLMQHVPLRILRSKGLLDKIPFATVITDLSTCHPTWFHKLVTRCYCPSTEVEKRALKAGLKPAQIKVYGLPVRPSFVKPVRPKDELRRELGMDEDLPAVLLMGGGEGMGPIEATAKALGDSLYDENLGEPTGQILVICGRNKKLVNRLQSINWKVPVQVKGFVTKMEECMGACDCIITKAGPGTIAEAMIRGLPIILNDYIAGQEAGNVPYVVENGCGKFSKSPKQIAKIVADWFGPRSDEFRVMSQNALKLARPDAVFKIVHDLHELVREKCFVPQYACAT

SEQ ID NO: 2598 - protein, 562 aa, Zea mays
MADVHEPLVRRKRKKVLVDYLVKFRWILVIFVVLPISTLIYFNIFLGDMWSAMKSEKKRQKQHDENVQKVVKRLKQRNPKKDGLVCTARKPWIAVGMRNVDYKRARHFEVDLSSFRNILEIDKERMVAKVEPLVNMGQITRATCPMNLALAVVAELDDLTVGGLINGYGIEGSSHLYGLFSDTVVAMEVVLADGRVVRATKDNEYSDLFYGIPWSQGTLGFLVSAEIKLIPIKEYMKLTYTPVKGGLKEIAQAYADSFAPRDGDPAKVPDFVEGMVYTESEGVMMTGVYASKEEAKKKGNKINCVGWWFKPWFYQHAQTALKRGEFVEYIPTREYYHRHTRCLYWEGKLILPFGDQFWFRFLLGWLMPPKVSLLKATQGEAIRNYYHDNHVIQDMLVPLYKVGDALEFVHREMEVYPLWLCPHRLYKLPVKTMVYPEPGFEHQHRQGDTSYAQMFTDVGVYYAPGAVLRGEEFNGAEAVHRLEQWLIENHSYQPQYAVSELNEKDFWRMFDASHYEHCRQKYGAVGTFMSVYYKSKKGRKTEKEVQEAEAAILEPAYADEEA

SEQ ID NO: 2599 - protein, 754 aa, Zea mays
MTVDELKLQARASGGHGAKDQFPVGMRVLAVDDDPTCLKILENLLLRCQYHVTTTGQAATALKLLREKKDQFDLVISDVHMPDMDGFKLLELVGLEMDLPVIMLSANGETQTVMKGITHGACDYLLKPVRIEQLRTIWQHVVRRRSCDAKNSGNDNDDSGKKLQVVSAEGDNGGVNRNKRISRKGRDDNGDDGDDSDDNSNENGDSSSQKKPRVVWSVELHRKFVAAVNQLGIDKAVPKKILDLMNVENITRENVASHLQKYRLYLKRLSADASRQANLTAAFGGRNPAYVNMGLDAFRQYNAYGRYRPVPTTNHSQPNNLLARMNSPAFGMHGLLPSQPLQIGHNQNNLSTSLGNVGGMNNGNLIRGAHMPLQDTSKCFPTGPSGNSFANISNSTQLVTTNNLPLQSLEPSNQQHLGRLHSSADPFNSFVGEPPQFADLGRCNTTWPTAVSSSNVQEIGQKDRIVNRPKLEPLSSFTEASSQIPLLGSEMQSHQVASLASNGLPMPFTQEAVPFAYGSSTNSREMLNNNLALSNSGVNSTLPNLRIDGSVVPGQTLGGSNSGGCVVPPLQDGRIDHQAVSSHLNYNNELMGTGRLQRGLSGGLDDIVVDMFRPVWSYTSFFLYSRVVSITAPYFYVNHAFFFQCRTAQTMASPSLMGTGNWSSKFQFSTSSLPSCEIFRICGCGGVRRLIGPKLFIVARLHHKCPLHLVFQFSDQVPVSRPNINYVVFATLTRMAMFSSQVLTVAIVIYTAWL

SEQ ID NO: 2600 - protein, 275 aa, Zea mays
MGRSPCCEQAHTNKGAWTKEEDQRLIAYIKAHGEGCWRSLPKAAGLLRCGKSCRLRWINYLRPDLKRGNFSEEEDELIIKFHELFGNKWSLIAGRLPGRTDNEIKNYWNTHIKRKLLARGMDPQTHRPLAAAPAGGPQQQHCHYQMEPQKRAAAADHSEAAVATNSPEASSRSSDDDEAPALAPPPRRRQRHLDIDLNLSISLAAYQPPEGTGSAIEPLTATTKREEGTAAAVCLCLNSLGYRAGVECACGSGGSPSSRSQWARDFLQAAPCYRG

SEQ ID NO: 2601 - protein, 399 aa, Zea mays
MCNPYNSRSQTIAKLRAKMSWRRNQLRAFLVLAVILLITAATYRANAQPAPPADPTPAADTCADPSVEGACRNVPKALRLKLIAIPTILVSSVIGVCLPLLSRSVPALRPDRNLFVIVKAFASGVILATGYMHVLPDSFSNLTSPCLPRKPWADFSFTTFVAMLAALFTLMVDSLMLSFYNRRKGGNTSGRRTSGAVADHESPAHEHHWHSHGHGHGHGHAGGIVVADKPEDDEASQVQLRRNRVVVQVLEMGIVVHSVVIGLGMGASQNVCTIRPLVTAMCFHQLFEGMGLGGCILQAEYGAKMKAGLVFFFSTTTPFGIALGLALTKVYRENSPTALIVVGLLNAASAGLLHYMALVELLAADFMGPKLQSSVRLQLLCFLAVLLGAGGMSIMAKWA

SEQ ID NO: 2602 - protein, 941 aa, Zea mays
MASAMKLLGRSSLASPAAAAPGRERRGGPCFAAVGREGSAHRRRSSLRSTAPVGALAERVVVTPAPPERAGAGPPEPHPQSVAARAVVTVRRRRKEDAKRRVAEQLDAYADRVGRSVLLELISTETDPRKGGPKKSRRSALVGWFEKKDVKTERVVYTADFTVDGSFGEPGAVTVLNRHQREFFIESIVVEGFPSGPAHFTCNSWVQPTRVDRNPRVFFTNKPYLPAETPPGLQELRRQQLSDLRGEGADTGERRITDRVWEYDVYNDLGNPDKGAEFARPVLGGEQQLPYPRRMRTGRPKTITGKPPLSHDRAESRVEYPEPIYVSRDEEFEDGKNEMLSEGALKALLHNFMPLLVSSVSPDIRDFAGFHDVDNLFKEGLRLKQALQDQLFQKIPFVRKIQENSEGLLRYDTPDIIKSKPAPMRLPPPPSMIHGEDKFAWLRDDEFARQALAGINPVNIERLQAFPPMSKLDPAVYGPPESAITEEHIIGQLDGMSVQQALQDDRLYMLDYHDIFMPFLDRINALDGRKAYGTRTLFFLTAAGTLKPIAIELCLPPMTDGCARAKRVFTPPADATSNWLWQLAKAHVCSNDAGVHQLINHWLRTHAAMEPFIIAAHRHLSTMHPIFKLLKPHMRYTLKINALARQILINGDGVIESGFTPGRYCMEMSSFAYRELWRLDQEGLPADLIRRGMAVEDPTQPHGLRLLIEDYPYATDGLLLWSAIRRWCDAYVAMYYPSDESVQGDTELQSWYREAVHTGHADKRDAPWWPRLSTPADLASLLTTLLWLTSAQHAALNFGQYPLGGYIPNRPPLMRRLVPAEGDPEYAHLVADPHRFFLSALPSLTQTTTFMTVIDTLSTHSADEQYLGERPDEAWTADPAALAAAREFADEVRRAEEEIERRNADTGRRNRCGAGVLPYELMAPTSGPGITCRGVPNSVTI

SEQ ID NO: 2603 - protein, 887 aa, Zea mays
MFWHGVADRLTGKNKEAWNEGKIRGTVRLVKKEVLDVGDFNASLLDGVHRILGWDDGVAFQLVSATAADPSNGSRGKVGKAAHLEEAVVSLKSTTDGETVYRVSFEWDGSQGVPGAVLVRNLQHAEFFLKSLTLEGVPGRGTVVFVANSWIYPHNLYSQERVFFANDTYLPSKMPAALVPYRQDELKILRGDDNPGPYKEHDRVYRYDYYNDLGEPDKGEDHARPVLGGSQEHPYPRRCRTGRRPTETDPNSESRLFLLNLNIYVPRDERFGHLKMSDFLGYSLKAIIEAVLPTLGTFVDDTPKEFDSFEDILGLYEPGPEAPNNPLVAEVRKRIPSEFLRSILPNGSHDHPLKMPLPNIIRSDVLKKAPEFKFGWRTDEEFARETLAGVNPVLIKRLTEFPAKSTLDPSQYGDHTSKITEAHIQHNMEGLSVQNALKKNRLFILDHHDHFMPYLNKINELEGNFIYASRTLLFLKDDGTLKPLAVELSLPHPDGQQHGAVSKVYTPAHSGAEGHVWQLAKAYACVNDSAWHQLISHWLNTHAVIEPFVIATNRQLSVVHPVHKLLSPHYRDTLNINALARQTLINADGIFERTVFPAKYALGMSSDVYKSWNFNEQALPADLVKRGVAVPDQSSPYGVRLLIKDYPYAVDGLVIWWAIERWVKEYLDVYYPNDGELQRDVELQAWWKEVREEAHGDLKDRDWWPRMDAVQRLARACTTVIWVASALHAAVNFGQYPYAGYLPNRPTVSRRPMPEPGSDDYKKLEAGQKEADAVFIRTITSQFQTILGISLIEILSKHSSDEVYLGQRDEPERWTSDARALDAFRRFGSRLVEIEKRIRTMNDSPTLKNRKGPVEMPYMLLYPNTSDVTGEKGEGLTAMGIPNSISI

SEQ ID NO: 2604 - protein, 508 aa, Zea mays
MQPDPSGNTNAKAKLPLMAPAPSSGRPASVLPYKTANVRDHYRIGKKLGQGQFGTTYHCVGKADGAEYACKSIPKRKLLCREDYEDVYREIQIMHHLSEHPNVVRIRGAYEDALFVHIVMELCAGGELFDRIVAKGHYSERAAANLIKTIVGVVEGCHSLGVMHRDLKPENFLFASTAEEAPLKATDFGLSMFYKPGDKFSDVVGSPYYVAPEVLQKCYGPEADVWSAGVILYILLCGVPPFWAETESGIFRQIMRAKLDFESEPWPSISDSAKDLVRNMLTRDPKKRFSAHEVLCHPWIVDDAVAPDKPIDSAVLSRLKHFSAMNKLKKMALRVIAESLSEEEIGGLKELFKMIDTDNSGTITFDELKDGLKRVGSELTENEIQALMEAADIDNSGTIDYGEFIAATLHMNKLEREENLVSAFSFFDKDGSGFITIDELSQACHEFGLDDVHLEDMIKDVDQNNDGQIDYSEFTAMMRKGNAGATGRRTMRNSLHLNLGELLNPSKT

SEQ ID NO: 2605 - protein, 264 aa, Zea mays
MAAATMALTSRALVGKPATSTRDVFGEGRITMRKTAGKPKPAASGSPWYGADRVLYLGPLSGQPPSYLTGEFPGDYGWDTAGLSADPETFAKNRELEVIHCRWAMLGALGCVFPELLARNGVKFGEAVWFKAGSQIFSEGGLDYLGNPSLIHAQSILAIWACQVVLMGAVEGYRIAGGPLGEVVDPLYPGGSFDPLGLADDPEAFAELKVKEIKNGRLAMFSMFGFFVQAIVTGKGPVENLADHLADPVNNNAWAYATNFVPGK

SEQ ID NO: 2606 - protein, 260 aa, Zea mays
MSAGGGGGGTSTLGGGGPSGSGSGGPGGSGGGGPCGACKFLRRKCVSGCIFAPYFDSEQGAAHFAAVHKVFGASNVSKLLLQIPAHKRLDAVVTICYEAQARLRDPVYGCVAHIFALQQQVVNLQAELTYLQAHLATLELPAPPPLPAPPQMPMPGPFSISDLPLSTSVPTTVDLSALFDPPPPQWATAQQPHHHHQQPPQHHQLRQPAPYGAGASVRPGGGPGMAESSGGDELQSLARELLDRHRSGGVKLEHPPPHSR

SEQ ID NO: 2607 - protein, 273 aa, Zea mays
MGRSPCCEKAHTNKGAWTKEEDERLVAHIRAHGEGCWRSLPKAAGLLRCGKSCRLRWINYLRPDLKRGNFTEEEDELIVKLHSVLGNKWSLIAGRLPGRTDNEIKNYWNTHIRRKLLSRGIDPVTHRPVTEHHASNITISFETEVAAAARDDKKGAVFRLEEEEERNKATMVVGRDRQSQSQSHSHPAGEWGQGKRPLKCPDLNLDLCISPPCQEEEEMEEAAMRVRPAVKREAGLCFGCSLGLPRTADCKCSSSSFLGLRTAMLDFRSLEMK

SEQ ID NO: 2608 - protein, 204 aa, Zea mays
MEDDEDIWANTASSPSASPPQPVAAGSVSTCSAFISTQLSLNSRLHLLSSAAAGGGSSPVRGGAYGADGVRHHHMALGGGFRNAAASQGSFFPYNLAGAGADVAPFDGGRGVLEDDMSVGAAASGTWAGGGTDRRKKRMIKNRESAARSRARKQAYVRELETKVQLLQQENESLRVKYDELRESVEVAVPMVRKTLQRMPSAPF

SEQ ID NO: 2609 - protein, 618 aa, Zea mays
MFDDAGAVAVKRMRLWEEDEVEVEEEGMEVDAEPGWPWGTPAAGLSRAAAIVVADAAEPDFPVIYVNAAFESATGYRAHEVLGRNCRFLQFRDPRAQRRHPLVDPMVVSEIRRCLNEGIEFHGELLNFRKDGAPLYNRLSLIPMHGDDGYVTHVIGIQLFSEANIDLSSVSYPVYKQQTNNRPSIQDLNSASHEHAPKVQSADHCGILQLSDEVLAHNILSRLSPRDVASIGSVCTRMHELTKNDHLRKMVCQNAWGRDATVKLEMSTKMVGWGRLARELTTLEAASWRKFTVGGRVEPSRCNFSACAVGNRLVLFGGEGVNMQPMDDTFVLNMEAARPEWRRVKVSASPPGRWGHTLSWLNGSWLVVFGGCGQQGLLNDVFVLDLDAQQPTWREVASEGPPLPRSWHSSCTLDGSKLVVSGGCTESGVLLSDTFLLDLTKEKPAWREIPTSWSPPSRLGHTMSVYGTTKLLMFGGLAKSGSLRLRSSDAYTMDVGEDSPQWRQLATTGFPNVGPPPRLDHVAVSLPCGRIIIFGGSIAGLHSPAQLFLVDPAEEKPTWRILNVPGKPPKFAWGHSTCVVGGTRVLVLGGHTGEEWILNELHELCLASRPDDDDDDRY

SEQ ID NO: 2610 - protein, 931 aa, Zea mays
MPTAVPTPKAVVHQRFGAKARYTVEEVREDVGGCPGLAPQTRNVYRCALDLPGLSVATPGTFLRKKDAEQAAAQIALDKLGIHPTANSPTTPQEAWAELIARISGFFIDENFLSSTHPLIGHLCVSLRRTGDLIGRLPLSAIAACDVKVNTLCKLIDHRAEFDPLLVLSLLYNAAKQSPGVSVSDSNFWIQSEKPYSPEAVDSALERWSGTTDPVEVEAVLVPHMLEDELKTVRINLRDNEHYMSYVAAELSAIDSSHVLVSRTIGKTSSEIRLYFAAANIHAVSDMSKHALDSLGDGDINWQVNKRASYICGQTIYGDALLANIGYTRRDSELHTEDVNLCSYYRILLGKLPDGNCKMSRDSILAAELPSAYSRFSWKGLSPRDLLCSFCRLQRLPEPHFAVSRVSCDTLMSAVSSEERGAPAGSAENQYTNDVRINKEKPDLFKCEVNIRSRKQEVLLEYSAADTWSKESDAIQNSSLKVLIWFNNYFKKLTSKTGKLYLSESTAGVKVHSNIFLQEFAMCLSVYGKNGCSDSAMCSAVGPFSMDTQKKHLESTAKLTHIEGPDSGVFPSHGSLTCISYTASLVTKDKAKTYLLESHNEFEFEIGTGAVSNQLESCVTQLSVNQTARFVAELPPRDLIMAASCEFSHDLSNVSSESCFLEFSVKVLQVTEPLEDRMEKALFSPPLSKQRVEFAVRHINELHATTLVDFGCGSGSLLDSLLEHPTTLEKLVGVDISRKGLTRAAKSLHQKLSKKSTTQTNVPTAVLYDGSITDYDSRLYGFDIGTCLEVIEHVEEDQATLFGNVVLSSFRPTVLIVSTPNYEYNPILQGSAMPNKDDEADESAGPCKFRNHDHKFEWTRLQFQCWATGLAVKHSYSVEFSGVGGSGEEPGYASQIAVFRRLVQGQEAMCLDEDGDQPYEVLWEWPNACVN

SEQ ID NO: 2611 - protein, 590 aa, Zea mays
MAVTRVAVAAALSAAPLSSRRHRVALPSACRLLPASATCCNSRAPMSLQAAAAAPAAGAVDEETPASSPPSDASKGVENLVIIGSGPAGYTAAIYAARANLKPVVFEGCQMGGVPGGQLMTTTEVENFPGFPDGITGPDLMDRMRKQAERWGAELYQEDVEFVNVKSSPFVIRSSDREVKCHSLIIATGATAKRLRLPREDEFWSRGISACAICDGASPLFKGQVLAVVGGGDVATEEAVYLTKYARHVHLLVRKDQLRASKAMQDRVLNNPNITVHFNTEAMDVVSNDKGQMSGVHLKRRDTGEESVLTVKGLFYGIGHTPNSQLLQGQIELDSAGYILVKEGSAKTSVDGVFAAGDVQDHEWRQAITAAGSGCIAALSVERYLVANDLLVEFHQPVQEETKKDITDKDVQMGFDISHRKHKGQYALRKLYHESPRLICVLYTSPTCGPCRTLKPILSKVIDEYGEFVHLVEIDIEEDPEIAEAAGIMGTPCVQFFKNKEMLRFVICTSISLVSSVVIRFFMFVPIFSLLGNGIHFFWRILNELANQRHRHILAKYWTSWCMCILSFLAKHYLMFSNKILLNKGMQLNS

SEQ ID NO: 2612 - protein, 504 aa, Zea mays
MARLVSTATKAMAVVVLAAASAALAAHDYGDALHKSILFFEGQRSGRLPPNQRLRWRQDSAIHDGAEAGVRTGVDLTGGYYDAGDNVKFGFPMAFTATLMSWGLIDFGRSFGAHEAEARDAVRWATDYLMKATATPGVVYVQVGDASRDHACWERPEDMDTPRTVYRVDAAHPGSDVAAETAAALAAGSIVFRDADPGYSRRLLGRAAEVFEFADRHRGAYSGSLRAAVCPCYCDYDGYQDELLWGAAWLHRASRRREYRDYIKRNEVALGASDAINEFGWDNKHAGINVLISKEVLMGKDEFFRSFRENADNFICSLLPGISGHPQIQYSPGGLLFKVGNSNMQHVTSLSFLLLVYSNYLSHADARVPCSSSSSAAAASPVQLRRVAKRQVDYILGDNPLRMSYMVGYGPRYPLRIHHRASSLPSVSAHPARIGCKAGAAYYASPAPNPNLLVGAVVGGPSNSTDAFPDARAVFQQSEPTTYINAPLLGLLAYFSQHPDPAQH

SEQ ID NO: 2613 - protein, 377 aa, Zea mays
MADGEDIQPLVCDNGTGMVKAGFAGDDAPRAVFPSIVGRPRHTGVMVGMGQKDAYVGDEAQSKRGILTLKYPIEHGIVSNWDDMEKIWHHTFYNELRVAPEEHPVLLTEAPLNPKANREKMTQIMFETFNVPAMYVAIQAVLSLYASGRTTGIVLDSGDGVSHTVPIYEGYALPHAILRLDLAGRDLTDSLMKILTERGYSFTTTAEREIVRDIKEKLAYVALDYDQELENAKSSSSVEKSYELPDGQVITIGAERFRCPEVLFQPSFIGMEAPGIHETTYNSIMKCDVDIRKDLYGNIVLSGGTTMFPGIADRMSKEITALAPSSMKIKVVAPPERKYSVWIGGSILASLSTFQQMWISKAEYDESGPAIVHRKCF

SEQ ID NO: 2614 - protein, 467 aa, Zea mays
MADEKLAKLREATAGLTQISENEKSGFLSLVGRYLSGDEEHIEWAKIHTPTDEVVVPYDTLESPPEGTEATKKLLDKLAVLKLNGGLGTTMGCTGPKSVIEVRNGFTFLDLIVIQIESLNKKYGSNVPLLLMNSFNTHDDTLKIVEKYTNSSIEIHTFNQSQYPRVVADEFLPWPSKGKTDKDGWYPPGHGDIFPSLMNSGKLDLLLSQGKEYVFIANSDNLGAIVDMKILNHLIHKQNEYCMEVTPKTLADVKGGTLISYEGRVQLLEIAQVPDAHVNEFKSIEKFKIFNTNNLWVNLKAIKRLVEADALKMEIIPNPKEVDGVKVLQLETAAGAAIRFFDHAIGINVPRSRFLPVKATSDLQLVQSDLYTLVDGFVTRNSARTNPSNPSIELGPEFKKVGSFLGRFKSIPSIVELDSLKVSGDVWFGSGIVLKGKVTITAKPGVKLEIPDGAVIGNKDISGPEDL

SEQ ID NO: 2615 - protein, 370 aa, Zea mays
MKERQRWRPEEDAVLRAYVRQYGPREWHLVSQRMNVALDRDAKSCLERWKNYLRPGIKKGSLTEEEQRLVIRLQAKHGNKWKKIAAEVPGRTAKRLGKWWEVFKEKQQRELRDSRRPPPEPSPDERGRYEWLLENFAEKLVGERPQQAAAAPSPLLMAAPVLPPWLSSNAGPAAAAAAAVAHPPPRPPSPSVTLSLASAAVAPGPPAPAPWMPDRAAADAAPYGFPSPSQHGGAAPPGMAVVDGQALAELAECCRELEEGRRAWAAHRREAAWRLKRVEQQLEMEREMRRREVWEEFEAKMRTMRLEQAAAAERVERDHREKVAELRRDAQVKEEKMAEQWAAKHARVAKFVEQMGGCSRSWSSATDMNC

SEQ ID NO: 2616 - protein, 406 aa, Zea mays
MDSTSCLVDDASSGASTGKKPAPAPAAATGKPLQRVGSGTSAVMDAAEPGAEADSGGAGRAPGGVSGKLPSSKYKGVVPQPNGRWGAQIYERHQRVWLGTFTGEAEAARAYDVAAQRFRGRDAVTNFRPLAESEPEAAVELRFLASRSKAEVVDMLRKHTYGEELAHNRRAFAAASPAASPPPENNRRPPAASSSSSPAAAREHLFDKTVTPSDVGKLNRLVIPKQHAEKHFPLQLPAAAAAGVGSGGECKGVLLNFEDAAGKAWRFRYSYWNSSQSYVLTKGWSRFVKEKGLHAGDAVGFYRSAGGKQQLFIDCKLRPNKTTTTAAAFVNVNAMTTTAAPPLAAVKAVRLFGVDLLTTPRPAAVAPEQEEVTVANKRARDAMATAASTPAPVHMVFKKQCIDFAR

SEQ ID NO: 2617 - protein, 974 aa, Zea mays
MPALVNHQSTTSLAPSHPSSAPPFPTTTPHVRRLPSPTRRQALSSQQRTHHPLRLRSAARRGGLWSRVRLQTMATTATISLLQHVRPPASGGSLLPLPLQRLRPIHCRRSAPASHHSLHRSLHLRLPTRGAPADRPRATADPSSALDAAAGEGAAGATTALLDVSGMMCGGCAARVRSILAADPRVEMAAVNLLAESAAVRLRAPAPPGAGEELAARLTECGFPATARRGGAAAGAGESARKWREMAARKEELLVRSRGRVAFAWTLVALCCGSHASHILHSLGIHVGHGTFLDLLHNPYVKCGIATTALFGPGRDILFDGFRAFKQGSPNMNSLVGFGSAAAFTISAVSLLNPDWEWNSTFFDEPVMLLGFVLLGRSLEESARLKASSDMNELISLLSPQSRLIVTSSSDNPSADSSLNSDAITVEVPVDDVRVGDSILVLPGETIPVDGNVIEGSSFVDESMLTGESLPVAKETGLPVFSGTVNWDGPLKIRATCTGPSSTIAKIVRMVEDAQAREAPVQRLADSIAGPFVYTVMTLAATTFSFWYYIGTHLFPEVLLNDIAGPDGDSLLLSIKLAVDVLVVSCPCALGLATPTAILIGTSLGAKRGLLVRGGDVLERLAGIDTLVLDKTGTLTEGKPVVTSIASLAYEETEVLRLAAAVEKTALHPIANAIMNKAELLKLDIPITSGQLTSPGFGCLAEVDGSLVAVGTLDWVHDRFETKASPTELRDLRNRLEFMLSSEASSSNQSKSIAYVGREGEGIIGAIAISDILREDANLTVERLQQESITTFLLSGDRGEAVTSIGRTIGIRNENIKSSLTPQDKASIISTLQAKGHRVAMVGDGINDAPSLAAADVGIAMRTHSKENAASDAASVVLLGNRLSQVVDALSLSKATMAKVHQNLAWAVAYNIVAIPIAAGVLLPQYDFAMTPSLSGGLMALSSIFVVSNSLLLQLHGSFQNTEKRQGDLSSRLN

SEQ ID NO: 2618 - protein, 1010 aa, Zea mays
MEGFAKPSTSSGSGVTVRASVAAASIEERFADLCKAKLGLDESTTRQAMQLLKETNNILKSSMSSLGGGSPEEIERFWSACVLYCVSRLSKAGRSKEDGSVSLCQILRASKLNIVDFFKEMPQFCIKVAHILTGLYGSDWEKRLELKELQANVVHLSLLSSYYKRAYQELFLSNDGKSSDNSSESNNQEASDYYRFGWLLFLVLRIQTFSRFKDLVTSTNELVSVLAVLIIHVPVRLRNFDIKDSSYFGKKSDRGVSLIASLCEKHHTSEDELSKALEKTNTLIMDILKKKPCPATSACQQDNLSFIDPEGLTVFKDLLQGDSLKPSLIILEKEYENAINTKGELDERMFANDEDSLLGSGSLSGGAINLPGTKRKYDVMASPAKSISSPNPMSPPRFCLSPKGNGFCNSKMAPSTPVSTAMTTAKWLRNTVSPLPSRPSGELLRFFSACDKDLTDDIAHRAGIILGAIFTSSSFGERICTSMRSASRMDAIWTEQRKMEALKLYYRVLESMCRAESQILSGNNLTSLLSNERFHRCMIACSAELVLATHKTVTMMFPAVLEKTGITAFDLSKVIEGFVRHEDTLPRELKRHLNSLEERLLESMAWEKGSSMYNSLIVARPALSVEISRLGLLAEPMPSLDAIAAHHNISLGGLPPLPFQKQERLQDKDEVRSPKRACTERRNVLVDSNSLRSPVKDIIKPKLPPLQSAFASPTRPNPAAGGETCAETGIGVFFSKISKLAAIRIRSLCERLQLPQQVLERVYSLVQQILSQQTGLFFNRHIDQIILCSIYGVAKISQLELSFKEIIFGYRKQPQCKPQVFRSVYVHWPPRSRNGKTGEDHVDIITFYNEVFIPAVKSLLVEVGPGASASPKKKEEEKGPADVGPFPESPRLARFPNLPDMSPKKVSATHNVYVSPLRSSKMDTLLSPSSKSYYACVGESTYAFQSPSKDLKAINNRLNSVSGGKKVSGRLNFDVVSDLVVASSLGSDRDAKPAADPAKTTPVKCEPSDS

SEQ ID NO: 2619 - protein, 696 aa, Zea mays
MDDWMLPSPSPRTLMPSFFSEEFISTPFSNIFADDRGSKPQDENEDSNTCIGSGAHETSQDVKCHRPQIESNIFGVNQKPTSPGGLAERIAARAGFGVLKIDISRVGSSGAAIRSPVTIPSGVSPRELLESPVFLPNAISQPSPTTGKLPFLMPNNFKSTMLCGPEKSEDHLHEDSAFSFQPFLRSKPPTLWTAKKGPSVVHETGSLSKDSQEELNLHANPAAATEHETEESLVIRPKACDSMFDNGHPSSPDEGPEQSEENQNREDCSAPVTAPGEDGYNWRKYGQKQVKNSEHPRSYYKCTHPSCPVKKKVERSVEGHVTEIVYRGSHTHPLPLPSRRSSVPPTQLECGSQSDGLENLSSKPGPAYHSAASQSQGIAPDGQFQDVHREALETKLSGSLTTTEIADRPVMDVSSTLSSNENGDRAVPPTNGRNEDETESKRRKMEASAATNTTTNTGIDMAAMASRASREPRIVVQTTSEVDILDDGYRWRKYGQKVVKGNPNPRSYYKCTYAGCSVRKHVERASNDLKSVITTYEGKHNHEVPAARNSGNGHPSSGSTPAPPQGSGGLHRRLEPPQVSIPRLSAAAAAAAAAAAYGSLSLRFPPQLSAAPGGFSFGMLRPTGMAPSLGGFLPAQMPGRGLPMQGCAGLVLPRGEAKVVSPEQQSGLPVANGNAAATYQQQQQQLMARWAQGHQM

SEQ ID NO: 2620 - protein, 662 aa, Zea mays
MAAVLAVLVSAVAATSITAAALNTDGLALLALKFAVSDDPGGALSTWRDADADPCAWFGVTCSTAAGRVSAVELANASLAGYLPSELSLLSELQALSLPYNRLSGQIPAAVAALQRLATLDLAHNLLSGPVPPGVARLVSLQRLDLSSNQLNGTIPAALAALPRLAGVLNLSYNHFTGAVPPELGAIPVAVSLDLRGNDLEGEIPQVGSLVNQGPTAFDGNPRLCGFPLKVQCAGAAGADDDPRIPNSNGPTDPGAAAEVGRRGGPRQPRRRRSSPAVPVLAAVIVVALVAGVVLQWQCRRRCAAAAGDEGKESGKEKGGGAVTLAGSEDRRSGGEEGEVFVAVDDGFGMELEELLRASAYVVGKSRGGIVYRVVPGRGPAVAVRRLSEPDDGDSDGSGSGSGWRRRRAFEAEAAAIGRARHPNVARLRAYYYAPDEKLLIYDYLPSGSLHSALHGGPTASPTPLPWSVRLSIVQGAARGLAYLHECSPRRYVHGCIKSSKILLDDELRAHVSGFGLARLVAGAHKAAGGGHSKKLGSAACALRGGGAASYVAPELRAPGGAPAAAATQKGDVFAFGVVLLEAVTGREPTEGEGGVDLEAWVRRAFKEERPLSEVVDPTLLGEVHAKKQVLAVFHVALGCTEPDPEMRPRMRAVAESLDRIG

SEQ ID NO: 2621 - protein, 493 aa, Zea mays
MAGAAAVETAAAAAAANGKACCHAAKGPGYATPLEAMEKGPREKLVYVTCVYNGTGINKPDYLATVDLDPSSPTYSQVIHRLPVTHIGDELHHSGWNSCSSCHGDPSAKRRFLILPSLLSGRVYVVDTATDPRAPSLHKVVESEDIAENTGLGFPHTSHCLASGDIMISCLGDKEGNAAGNGFLLLDSEFNVKGRWEKPGHSPLFGYDFWYQPRHKTMISSSWGAPAAFRTGFDLQHVQDGLYGRHLHVYDWPGGELKQTLDLGDTGLLPLEVRFLHDPSKDTGYVGCALTSNMVRFFKTADGSWSHEVAISVKPLKVRNWILPEMPGLITDFVISLDDRYLYFVNWLHGDIRQYNIEDPAKPFLAGQVWVGGLLQKGSDVVYVTDDGQEQQYNVPQVKGHRLRGGPQMIQLSLDGKRIYVTNSLFSRWDEQFFGDDLVKKGSHMLQIDVDTEKGGLAVNPNFFVDFGTEPDGPALAHEMRYPGGDCTSDIWI

SEQ ID NO: 2622 - protein, 394 aa, Zea mays
MMMMMGERAHAPPWQRSPAASGVTDADDASPYALLAALQHYLPSNEVAAYDEDDEEAALAAATAAVDAYACDEFRMYEFKVRRCSRGRNHDWTACPYAHPGEKARRRDPRRYHYSGAACPDFRKGGCKRGDACEFAHGVFECWLHPSRYRTQPCKDGTGCRRRVCFFAHTPDQLRVPPPRQSSPRGAAAAASPLAESYDGSPLRRQAFESYLTKSGIVSSPPPTSTLVSPPRSPPSESPPMSPDAAAALRRGSWPGVGSPVNEVLASMRQLRLGGGSPRSAPSGGSFLGGGYPFGSPKSPAGLYSLPSTPTRPSPVTVTTASGATVLTVERLNLGLIGDEEPVMERVESGRALREKVFERLSKEAAVPSDTAASANVEGAAPAPDVGWVSDLIN

SEQ ID NO: 2623 - protein, 892 aa, Zea mays
MMQQLRHSQPSPCLCGLRAARPMLALGAAASRSRPAGKLQPSVCLGLGHVAPAAARGQPRPRAVADSALGASPTSVHVGGKLLLQNFAADSQQRLKLSIQLVSATVADPDGRGVKAEASVLDAVVGSGDSELDVDLIWDEALGAPGAVVVKNHSDFPVYLRLLSVPAGVGGADDEAAAVHFACNGWVYPVDKHPYRLFFTNDACVKEETPSALLKYREDELGALRGDGETTERPFQPWDRVYDYALYNDLGNPDLRQDLARPVLGGSQEYPYPRRTKTGRPAAKTDPRSESRAPLDEEIYVPCDERVGFASIPAPTLPPLGGHFRSLADVYRLFGLDDLGRLPEAKAVINSGAPFPVVPQVISVNPTHWRKDEEFARQMIAGANPVCIKRVTKFPLASELDRGVFGDQDSKITKDHVEKNMGGMTVQQAVEEGRLYVVDHHDWVMPYLKRINELPASEEKAEVSQRKVYAARTLLFLDGEDSSMLRPLAIELSSPHPEKEQLGAVSTVYTPPDSGDDGITAGRFSTWELAKVYASANDAAENNFVTHWLNTHASMEPIVIAANRQLSVLHPIHRLLKPHFRKTLHINAVARQIIVGSGDQRKDGSVFRGIDEVTYFPSKYNMEMSSKAYKAWNFTDLALPNDLIKRGLAKGDPKKPETVELAIKDYPYAVDGLDMWAAIKKWVADYCAIYYADDGAVARDSELQGWWSEVRNVGHGDLADAPWWPAMDCVADLVETCATVVWLSSAYHASISFGQYDYLGFVPNGPSITTRPVPGPDAGAEVTESDFLASVTPVTEALGFMSIASGPMGLKGTEVYLGQRPDTEQWTRERRAAEALAEFRARLEEVAGNIDRRNADPALKNRTGQVEVPYTLLKPTAQPGLVLRGIPNSITV

SEQ ID NO: 2624 - protein, 105 aa, Zea mays
MASRSSAMEGGAAIQRRNAVKRHLQQRQQEADFLDKKVIASTYFSIGAFLVLACLTVSLLILPLVLPPLPPPPSLLLWLPVCLLVLLVVLAFMPTDVRSMASSYL

SEQ ID NO: 2625 - protein, 300 aa, Zea mays
MACCSLRSKKQRATRRRWGCCAFCRAPSKHQWRRRSSTHTGRKPSHKAWRECSAASAAARHGRGLRLRGEAGRAAAVSRHEGEMELSSLFAARRGQQGEEEDPAAVARGRTSKGKEGASAWGIFLGVHGRELLRRHGQGGSAMRKLELEPWEREGSSLGHLLRHGRKQDAMAGGARGAESLLLAFSKGAELGWKQPRRELARAVKESSAARVPGGRSSPQGRLAPWEQLGRELLCAMSRREEGTGWEKWRRGGTQAGRRGLGVHGCKPCSLLAAVGAREEEGRGMRALAGRRRGRNVVAA

SEQ ID NO: 2626 - protein, 994 aa, Zea mays
MPVRSSVAMTTTAARALAALVLVTAAAAAAAVADDGAALVEIKKSFRNVGNVLYDWAGDDYCSWRGVLCDNVTFAVAALNLSGLNLEGEISPAVGSLKSLVSIDLKSNGLSGQIPDEIGDCSSLRTLDFSFNNLDGDIPFSISKLKHLENLILKNNQLIGAIPSTLSQLPNLKILDLAQNKLTGEIPRLIYWNEVLQYLGLRGNHLEGSLSPDMCQLTGLWYFDVKNNSLTGAIPDTIGNCTSFQVLDLSYNRFTGPIPFNIGFLQVATLSLQGNKFTGPIPSVIGLMQALAVLDLSYNQLSGPIPSILGNLTYTEKLYMQGNRLTGSIPPELGNMSTLHYLELNDNQLTGSIPPELGRLTGLFDLNLANNHLEGPIPDNLSSCVNLNSFNAYGNKLNGTIPRSLRKLESMTYLNLSSNFISGSIPIELSRINNLDTLDLSCNMMTGPIPSSIGNLEHLLRLNLSKNDLVGFIPAEFGNLRSVMEIDLSYNHLGGLIPQELGMLQNLMLLKLENNNITGDVSSLMNCFSLNILNVSYNNLAGAVPTDNNFTRFSHDSFLGNPGLCGYWLGSSCRSTGHRDKPPISKAAIIGVAVGGLVILLMILVAVCRPHHPPAFKDATVSKPVSNGPPKLVILHMNMALHVFDDIMRMTENLSEKYIIGYGASSTVYKCVLKNCKPVAIKKLYAHYPQSLKEFETELETVGSIKHRNLVSLQGYSLSPVGNLLFYDYMESGSLWDVLHEGSSKKNKLDWVTRLRIALGAAQGLAYLHHDCSPRIIHRDVKSKNILLDKDYEAHLTDFGIAKSLCVSKTHTSTYVMGTIGYIDPEYARTSRLNEKSDVYSYGIVLLELLTGKKPVDNECNLHHLILSKTASNEVMETVDPDVGDTCKDLGEVKKLFQLALLCTKRQPSDRPTMHEVVRVLDCLVNPEPPPQPQQQQQKAHAHHQLPPQPSPPAYVDEYVSLRGTGALSCANSSSTSDAELFLKFGEAISQNMV

SEQ ID NO: 2627 - protein, 301 aa, Zea mays
MAASTTSRTNSRVNYSNEIHDLSTVQGGSAAAAAAALFYPDSKSIADIFPPHLGKKVISEVVATFLLVFVTCGAASIYGEDNARISQLGQSVAGGLIVTVMIYATGHISGAHMNPAVTLSFACFRHFPWIQVPFYWAAQFTGAMCAAFVLKAVLQPIAVIGTTTPSGPHWHALAIEIVVTFNMMFVTCAVATDSRAVGELAGLAVGSAVCITSIFAGPVSGGSMNPARTLAPAVASNVFTGLWIYFLGPVVGTLSGAWVYTYIRFEEAPAAAKPDTQRLSSFKLRRMQSQSALAADEFDTV

SEQ ID NO: 2628 - protein, 294 aa, Zea mays
MAAASTTSRTNSRVNYSNEIHDLSTVQSGSVVPTLFYPDKSIADIFPPHLGKKVISEVVATFLLVFVTCGAASIYGEDNRRISQLGQSVAGGLIVTVMIYATGHISGAHMNPAVTLSFACFRHFPWIQVPFYWAAQFTGAMCAAFVLKAVLHPIAVIGTTTPSGPHWHALLIEIVVTFNMMFVTCAVATDSRAVGELAGLAVGSAVCITSIFAGPVSGGSMNPARTLAPAVASNVFTGLWIYFLGPVIGTLSGAWVYTYIRFEEAPAAKDTQRLSSFKLRRMQSQLAADEFDTV

SEQ ID NO: 2629 - protein, 208 aa, Zea mays
MAASTVTCFTTGEPHREHDRAHKHEDSFRRNHKPPSRASIMEYGQQGQRGHGATGHVDQYGNPVGGVEHGTGGMRHGTGTTGGMGQLGEHGGAGMGGGQFQPAREEHKTGGILHRSGSSSSSSSEDDGMGGRRKKGIKEKIKEKLPGGHKDDQHATATTGGAYGQQGHTGSAYGQQGHTGGAYATGTEGTGEKKGIMDKIKEKLPGQH

SEQ ID NO: 2630 - protein, 345 aa, Zea mays
MFSISRKAQVTFCCIPPSFDADDKKALAVAPHTGNQPLDHLILLHTRVPDTTAHQCKEVATLSAMAQELHETSSCSATTTSSCTTSCCSSTVTDSSSSPPSPAAANAAPATRKRQALEAEAEAEAGGEEEEEEEEGCAGNKAAPAKKRPRGSEGKHPTFRGVRMRAWGKWVSEIREPRKKSRIWLGTFPTAEMAARAHDVAALAIKGRAAHLNFPDLAGALPRAASAAPKDVQAAAALAAAFTSPSSEPGAGAHEEPAAKDGAAPEEAAADAQAPVPVALPPPAASRPGTPSSGVEDERQLFDLPDLLLDIRDGFGRFPPMWAPLTDVEEVVNAELRLEEPLLWE

SEQ ID NO: 2631 - protein, 290 aa, Zea mays
MEDERNTQQHQGGEAQQDAADQVDVKDRGLLDSLLGRKKHDDDQEKKKQTDELATGMEKVTVSEPEKHGHKEEEHEVVGEKKEGLLAKLHRTSSSSSSSSDEEEEAIDENGEIIKRKKKKMGLKEKLKEKLPGHKDGHHTAAPSPAPAPVETHAHHQEEAHRPHVVPTPAPPPPPHVHQHDHGVVVQDDVKTGTPPHAPEEEKKGLLDKIKEKLPGGHNKKPEAAAAAAPAPPVHAPAPAPQAENVSSPDGKEKKGLLGKIMDKIPGYHKSSAEEADHKADAAGEHRTSS

SEQ ID NO: 2632 - protein, 606 aa, Zea mays
MDTHIGSVNGAASNQTVGCPASAPGCPMASTPAQPAATLSAGEASLGRHLARRLVQVGVNDVFAVPGDFNLTLLDHLIAEPGLRLVGCCNELNAGYAADGYARARGVGACAVTFTVGGLSVLNAIAGAYSENLPVICIAGGPNSNDYGTNRILHHTIGLPDFSQELRCFQTVTCHQAVVNNLDDAHEQIDTAIATALRESKPVYLSISCNLPGLPHPTFSRDPVPFFLTPRTSNKMGLEAAVEATVEFLNKAVKPVLVAGPKLRVAKAGKAFVDMVDASGYAYAVMPSAKGLVPETHPHFIGTYWGAVSTAFCAEIVESADAYLFAGPIFNDYSSVGYSFLLKKEKAIIVQPERVIVGNGPAFGCVMMKEFLSELAKRVNKNTTAYENYKRIFVPEGQPLESEPNEPLRVNVLFKHVQKMLTGDSAVIAETGDSWFNCQKLKLPEGCGYEFQMQYGSIGWSVGALLGYAQGANHKRVIAFIGDGSFQVTAQDVSTMLRCEQNSIIFLINNGGYTIEVEIHDGPYNVIKNWNYTGFVDAIHNGLGKCWTSKVKSEEELTAAIETALGEKKDCLCFIEVIAHKDDTSKELLEWGSRVSAANSRPPNPQ

SEQ ID NO: 2633 - protein, 802 aa, Zea mays
MPLQLMPPHYYPVLLPLLVLAAVAGVSAGGGGDGDVVERTYIVRVDADAKPSVYPTHAHWYEAAVLAAAGDGSEWPEGGPLIHTYSAAFQGFSARMSPAAAEALASAPGVAAVVPERVRQLATTRSPRFLGLLSSPPSALLAESDFGADLVIAIVDTGISPAHRSFHDRGLGPVPGRWRGLCASGPGFPPSSCNRKLVGARFFSKGYEATSGRMNETAEVRSALDTDGHGTHTASIAAGRYVFPASTLGYARGVAAGMAPKARLAAYKVCWVGGCFDSDILAAFDAAVADGVDVVSLSVGGVVVPYYLDAIAIGAFGATEAGIVVSASAGNGGPGGLTVTNVAPWMATVGAGSMDRAFPANVRLGDGQVLDGVSVYGGPALESGKLYELVYAGASGGGASSASDGYSASMCLDGSLDPAAVRGKIVVCDRGVNSRAAKGDVVRRAGGVGMVLANGAFDGEGLVADCHVLPATAVGAAAGDRLRKYIASATKQRPATGTILFEGTHLGVHPAPVVAAFSARGPNPQSPEILKPDLIAPGLNILAAWPSGVGPAGIPSDGRSTEFNILSGTSMACPHVSGLAALLKAAHPSWSPAAIKSALMTTAYVRDNSNGTVADESTGAAAGAFDLGAGHVDPMRAMDPGLVYDIGPSDYVSFLCNLNYTERNIRAVTRRPADCRGARRAGHAGNLNYPSLSATFVAAGAAAAAAASRTHFIRTVTNVGGGSAVYRASVTAPEGCNVTVQPRRLAFRRDGQRLSFAVRVEAALGGRMEPGSSLVRSGALTWSDGRHVVRSPIVVTVQAPLQ

SEQ ID NO: 2634 - protein, 259 aa, Zea mays
MAARNILRGAACGHRFLVPVPSGALAGSGSRSIGAVAQGLRHYAADEAVGNLELHAPKAKRRSYIPTKNGTAMMLPLHIHYEDVLRQDLLLKQNHANIMQVPGLFEVKLAPKAGSDLKIPIGKMAMEVLSGQRFKEAKIDPFAKARKSSRTNPFIGADKDGSTVFAQPTVLRGHAMYNFLVRMLTVMSMLNSRADIRENTVKFFMETEFCEFSPELEDHFEIFEHIRGFNVTIVTSANTKDETSLLWSGFMLNDEGETK

SEQ ID NO: 2635 - protein, 306 aa, Zea mays
MCGGAILAELIPTTPARRGGAAWPAGKCKRRKANDFEAAFREFDEDSEEEEEDEGVVESKPAFVVRASSAATQPRARQEQRSRRRAPDQQQYRGVRRRPWGKWAAEIRDPVKGVRVWLGTFPSAEAAARAYDHAARGIRGPRAKLNFPSSSSSAAGAPASRKRARTADADAVIDLEEQEQRPAAAALKHEAAECSGSDALPDFSWQGVSAAYDEPPAPRPAFDFEARPESAADEASPRASDSESDALFDSLLFGDQFAFFDAGAYESLDSLFSADAVQSNAAAAADQDMPLWSFDDGCLVEDNLSF

SEQ ID NO: 2636 - protein, 409 aa, Zea mays
MEMAGAAEADTPSHEPVRTGRSNTILLPIVGVLFAYLLYRFLRPRLRRGLRLDRHVPFPSGASLPAWLRRRAPSGSAVLPYFAPIADRLGALPYLGPFADRLPHGGGAHALVTFPGGEALSVATILEAPGEVVAKSAHSTLYRAAVRSGEAAVLLRFVRPACAVAAEEAYAAARRVGAVSHPNLVPLRAVYVGPRGEKLLVHPFYAAGSLHRFLQEGIEESHRWSIVCNLSLGIAKGLDHLHTGLDKPMVHGNLKTSNVLLDANYECRISDYGLYLLLSPAAAQEMLEASAAQGYKAPELVKMRDATCESDVYSLGVVLLELLAQKERADDDGRPNPRDILLPASFKNLVLERKISDAFSSDLARHCKRSGKEKSLNAFFELATACCSPSPSLRPSTRQVLKRLEEIAR

SEQ ID NO: 2637 - protein, 479 aa, Zea mays
MDEDWSTDPAHRRRRLLLPTSCQTQTQNPPQTQPPLPMDLASQYNRRFAPSLFLPPMAPRLASSSGFSVFSNYQSPPTLVPTAAGAGSHLARSLPKLPLFSMDSLGLLPYSTNPAAGAAVPRSLSSPGGSEQQVPSASGLPPRGAGHRRSRSDFLVGFSRPNQLSLPMTPAAGEYRSREASVLEELFRSYRDPNLSSSGDNNSERNDHLGRQLTGQGAWSPGDSSDNDAESWAASGSAAAGTSASHSHTRHCRSLSVDSIMGNLNFGGLGQVSLRLPPPSPVAGAGGSLSRAGSGASGGAVATASSQPANGEFSESEMKKIMANDRLAELALVDPRRVKRILANRISAAKSKERKVKYMGELERKVRVLQMETSTLSSKAASSQRECEALRILNNEMKIRLQAMEQQAQLKDALNEALTAEVQRLKQIAGEASDPHVPNMSRKIVEQQLQKQPSEAQLAEQQQPQESEEFKAQQKQWNH

SEQ ID NO: 2638 - protein, 532 aa, Zea mays
MAKPTRPFPIIAKISSPSAWAAQWPVYIVSSLHMAVPGKEAPTTVDTMASPLLSLATAALAVAVLISTTEAWRATPTPLPVLPIPSAAQLKWQRREVIMFFHFGMNTFTDSEWGTGWEDPSLFYPARLDATQWMDAARAAGASLAILVAKHHDGFCVWPSEYTAHSVRASPWRGGRGDVVREFVDAARARGVDTGLYLSPWDRHDERYGQEVAYNEYYESQLHELLTGYGSVSEIWFDGAKGKDATNMTYHFQEWFQTVKQLQPSINIFSAVGPDVRWVGDETGEAGTTCWSTVNRSMITIGEASDEKYLNEGDPRGSDWVPPECDVSIRPGWFWHKSETAKPLRQLLEIYYNSVGRNCVLLLNVPPNSTGLVEDADMARLREFGAAVATIFGTDLAAGSEARASSVRGAGFAARNVLDGREDTYWAPTAEDGRRDVYWIELRRPPGAQARPFNVVRIQEHVALGQRVERHAVYVDGAPVAYGTTVGHKRLHRLPCPVAGGTVRVWITARRGPPLLSAVGLHYDPFVAAATM

SEQ ID NO: 2639 - protein, 364 aa, Zea mays
MDRAALTVGPGMDMPIMHDGDRYELVRDIGSGNFGVARLMRNRADGQLVAVKYIDRGEKIDENVQREIINHRSLRHPNIIRFKEVILTPTHLAIVMEYASGGELFERICNAGRFSEDEARFFFQQLISGVSYCHSMQVCHRDLKLENTLLDGSTAPRVKICDFGYSKSSVLHSQPKSTVGTPAYIAPEVLLKKEYDGKVADVWSCGVTLYVMLVGAYPFEDPDEPKNFRKTIQRILGVQYSVPDYVHISPECQDLISRIFVANPSTRITMPEIRSHPWFLKNLPADLVDDSATTTSKQYEEPEQPMQGMDEIMQILGEATIPAAGSRGLNQFLNDGLDLDDDMEDLDSDADLDLESSGEIVYAM

SEQ ID NO: 2640 - protein, 304 aa, Zea mays
MWPYLNLRTPLRSPLPCTVALTIVSLISSPLSVSLVRSSSPAREGGRERARTMWHAAAAPNNLHPAVATTSSPALRRARWPIARPSSSVKVQSSTRNGNGSADNLDHLQRASKGRQQRQGASAPGPRARRVVRTTPFGLWWDSFPEARTLDQMVRTIMDADDADTDTRFGGVVPAAAAAAPTAVPRADHGRTPWEVRERAGEYLVRFDMPGMARDDVRVSVQDRTLVVAAEKKQQPAADGGGDEEGDNEEEAWPPASFGRYRTRVELPENVDVERIAAEVKDGVLYLTIPKLSAGAKVVNIQVQ

SEQ ID NO: 2641 - protein, 344 aa, Zea mays
MASSGYEGILLGMGNPLLDISAVVDEGFLAKYDVKPGNAILAEDKHLPMYDELASKSNVEYIAGGATQNSIRVAQWMLQIPGASSYIGCIGKDKFGEEMKKNAQAAGINAHYHEDENAPTGTCAVCVVGGERSLIANLSAANCYKSEHLKKPENWALVEKAKYIYIAGFFLTVSPDSIQLVAEHAAATNKVFMMNLSAPFICEVFRDAQEKALPYVDYIFGNETEARTFAKVRGWETENVEEIALKISQLPKASGTHKKITVITQGCDPVVVADDGKVKTFPVILLPKEKLVDTNGAGDAFVGGFLSQLVQEKNIDECVRAACYAANVVIQRSGCTYPEKPDFN

SEQ ID NO: 2642 - protein, 797 aa, Zea mays
MSPRSGMRMRSTTPLNSPTRSPTNPPTPGLSASPKPPLLLLVLVLVLLPYITASPPLHFPSRRAPKSIHHHSCLPSSSSATPHQHHHTHPLPAQMASNTAILESDPLNWGKAAAELTGSHLDEVKRMVAQFRDPVVKIEGSSLRVGQVAAVAAAKDASGVAVELDEEARPRVKASSEWILDCIAHGGDIYGVTTGFGGTSHRRTKDGAALQVELLRHLNAGIFGNGSDGHTLPSEVSRAAMLVRINTLLQGYSGIRFEILEAITKLINTGVSPCLPLRGTITASGDLVPLSYITGLITGRPNAKAVTVDGRKVDTAEAFKAAGIEGGFFKLNPKEGLAIVNGTSVGSALAAMVCFDANVLAVLSEVLSAVFCEVMNGKPEYTDHLTHKLKHHPGSIEAAAIMEHILDGSSFMKHAKEVNAMDPLLKPKQDRYALRTSPQWLGPQIEVIRAATKSIEREVNSVNDNPVIDVHRGKALHGGNFQGTPIGVSMDNARLAVANIGKLMFAQFSELVNEFYNNGLTSNLAGSRNPSLDYGFKGTEIAMASYCSELQYLANPITNHVQSAEQHNQDVNSLGLVSARKTAEAVDILKLMSSTYMVALCQAVDLRHLEENLKSAVKSCVMAVARKVLTTSLGGDLHSARFSEKALLTAIDREAVYGYYDDPCSANSPLMKKIRAVLVDHALASGEAEKDASASVFSKINRFEEELREALPREMEAARVAFETGAAPIANRIKESRSYPLYRFIRQDLGAVYLTGEKLKSPGEECNKVFLALSEGKLIDPMLDCLKEWDGKPLPIC

SEQ ID NO: 2643 - protein, 127 aa, Zea mays
MRSQALFFLTIALLTVLARSSNRHHHHHSHVQSRGQGAASGGGGGGELASRGKAAARAWPCCDSCGGCTRSEPRLCRCLDAAPRGCHPACRDCVKSSLSADPPVYQCMDRVPDFCLRRCTAPAAAAR

SEQ ID NO: 2644 - protein, 1013 aa, Zea mays
MASRGRGGGGGKGPSGGRGGEGRGRGIRGGGGYHHGDDGGGERGGRGDPGRGRGVGGRGRGPGGRGVDDHQQQPPPLGNTEGGGQGRGGMAVAVPPARPAAPCPLAPDAAAPAFPAAAASSSAQAPRAPTEAAGAALADGMGKLAVADDRPAAPPVPAGKPVAQGPAHQPQEAPPLSRKRIVPPPRPGLGTSGRKLAVRANHFFVEVSVNDIFHYDVLINPEPKARKTNRMLLSELVKIHGATSLAHKTPAYDGSKSLYTAGELPFKSMEFVVKLGKAGREVDYKVTIRYAARPNVYQLKQLINSQLRNTPFDAIQALDVVLRESPSLNYVTLSRSFFSKKFGDDDIGGGLECWRGYYQSLRPTQMGLSLNIDTCSTSFYQPIDVVKFVADCLQLTNPGQPFLDRDRLKLKRALRGVLVETEHQQGKRSIYRITGITSVPLAQLSFSCNEGPQLTVVEYFAQRYNVQLRYTAWPCLQSGNDSKPIYLPMEVCKIIEGQKYPRKLSDTQVANILKATCKRPQDREENIIKMVRHNNYSADKMAQVFGITVANQMANVQARVLPPPMLKYHESGKEKTVAPSLGQWNMINKKMVNGGTIHSWTCLSFSRIPLRLVDEICHELVQKCNSIGMSFNPRPVTEVQKDSHNNIEAALRDVHRRAPNLQLLIVILPDVTGYYGEIKRMCETDLGIVSQCINPKKNRNKQYFENLALKINVKAGGRNTVLERASVPNGIPFVSDVPTIIFGADVTHPTAGEESSASVGAVVASMDWPQVTTYKALVSAQAHREEIIQNLGGMIRELLISFYKRTGKKPKRIIFYRDGISEGQFNHVLLLEMDAIRKACASLEDGYLPPVTFVVIQKRHHTRLFPGVHGRRDVTDRSGNILPGTVVDTEICHPREFDFYLCSHAGIQGTSRPIHYHVLYDENRFSADGLQILTNSLCYTYARCTRAVSVVPPAYYAHLAAFRGRYYDEQGSSPAPDGTSVVGGDAAAAGDDPPACRRLPQIKENVKEVMFFC

SEQ ID NO: 2645 - protein, 442 aa, Zea mays
MVMASAGVNVPGGDEVRNPTAASASTPECRMRRRHRLEPQGSGDAAAAAAPGPSWVRRLRPAASRFSPSPSPSLSPSSSQSSADRPNDEEQEELDHEVEVELAPAGPQLEPGEAEGEPEAEAVAVAPQVWPVAFGSLSMAGRMRMMEDAVSLHPDLCTWAADGSPMHFFGVFDGHGGSHVSALCRDRMHEVVAEELAREGATFLRRRQESAASGSAAWSERAEEERAWRAALQRGFRRVDDMAALACACGRVARPSCSCPLAGTSSGIVGSTAVVALLVRGRLVVANCGDSRAVLCRGPAGTPPVPLSSDHKEGSGRCCCSTDIKAGHAVAVPWIARNFQGGRCAPSLSPVGHVAGTAGDSEGEGGGHVSVDAGARGETRVVAGWWALVPQSCGAGAALSTRWVAVACAAGPAGEEKGVVAGGATCPSLRARSREKRRESME

SEQ ID NO: 2646 - protein, 292 aa, Zea mays
MPVSLLDGIRDAGLEFFHLPAAEKLKHANRDDAGEFQPEGYGIDRVDTDGQVLDWCDRLYLTVQPEEERRMQFWPARPASLVGLLHEYALGSEQVARRVLRAMARVLGFGEGFFLGHVGEKGGTYARFTYYPPCPRPDLVYGLKPHTDNSVVTVLLLDRDVGGLQVLLRGPGPGRWVDVPVLARDELLVVVGEEMEIMSNAVFRAPTHRVVTSGRERMSLVLFYQPEPHKDLQPAEELVSEDRPAIYRRLKAKTFGDGFWDAFALGERTIDFLNIKVDDKEHGGGLVTSAPA

SEQ ID NO: 2647 - protein, 403 aa, Zea mays
MAMAMRVESVEEAKQAAILPAAQEQRRVFPAGMLKLFLGLMLFGVVMGLSAFGVFLARHAEEMAAVAPALFRPCLGAAAAAEPEPEEGLERWTRPPARAQHAMTDEELLWLASYAPRMRGRSGYPFQRVPKVAFMFLTHGPLPLAPLWERFFRGNEDRYSIYVHTMPLYRANFTSNSVFYRRQIPSKAVQWGQMTMCDAERRLLANALLDISNEWFVLVSESCIPLFDFNTTYEYFQNSSHSFVMSIDDPGRDGRGRYNLNMAPEVELEQWRKGWQWFEADRDLAVAIVEDTVYYPKFKQFCRPGCYADEHYIQTMLKIEAPHKLANRTATWVDWSRGGPNSAHPATFGRGDITEEFLKGVRGGETCLYNGRNTTVCFLFARKFAPSALQPLLELAPTVLGFG

SEQ ID NO: 2648 - protein, 210 aa, Zea mays
MEGSAAQAPGKTVLRVVAISGSLRRASANTGLIRAAAEICRESIPGLEVEHVDISELPLLNTDLEGPGPGAFPAAVEAFRGKVRAADCFLFASPEYNYSISGPLKNALDWGSRPPNCWGDRAAAILSASGGSGGSRSQYHVRQVGVFLDLHFVNKPEVFTRAHQPPSKFDDDGNLVDPDTKDQVTKVLLALQALALRLHLGKLAVAAHSS

SEQ ID NO: 2649 - protein, 283 aa, Zea mays
MIRGGNHQQAADVEEELARNSRHAAAVATSRQWSAQTESRIVRVSRVFGGKDRHSKVKTVKGLRDRRVRLSVPTAIQLYDLQDRLGLNQPSKVVDWLLNAARHEIDKLPPLQFPPQDLMVGHLTPHNMPLMVHDEKFGHLAAAAALASGGGGGAKVSQQGNVVDVDGTGAHHLVGRFPGGYHRFMELNSALGMVSGAMAPPYNNNYTGEAWNNSGGGVHDSGSPQIVAAAAHHSPFPSLLSLAPRPHQLAFYSSEADQQFQVENLGSQSLSLSSARAYHDQAS

SEQ ID NO: 2650 - protein, 155 aa, Zea mays
MLQESNISKFKSQVQSSQENHFSLLQRETEKLRGDIDKMRSELKYEIDKVTAGQRLDLNLERGRIRDELAKQNEETTELTTKLDKVSGSKLRPHAHAFRVIVYIRDQPKCFAGHMQEIHSLKAQLEAAKYDVIKYCIGTIVSISAVGLAVLRIVM

SEQ ID NO: 2651 - protein, 447 aa, Zea mays
MGAPAPRPPPPRATARALLAVSVAVAAWLGASAGSDSGAGVLRRAQRGEFASWMAGVRRAIHERPELAFQEHETSALVRRELDAMGVAYRYPVAGTGVVAAVGTGAPPFVALRADMDALPLQEEVEWEHKSKEARKMHACGHDAHTAMLLGAARILHERRNDLQGTVVLLFQPGEEVGIGAKRMVEAGAVENVEAIFGFHVTVLLPTGVVGSRTGPLLAGCGFFEAVITGVGGHAASPHNTVDPVLAASSVVLSLQSLVSREADPLDSQVVTVTRFLGGGAFNVVPGSVTIGGTFRCFSAEGFLRLKRRIEEVVVAQSAVHRCAASVDFSAGGSPLLPPTVNAAPLHAHFEAVAADTVGVGAVRGAMEPCMGSEDFASFSAAVPASHFYFVGIGNEAIGAVHAAHSPHFLVDDGALPYGAAMHANLAIEYLRNHAIANRSVGPHDEL

SEQ ID NO: 2652 - protein, 423 aa, Zea mays
MFLQISNTEGQLYSLYIDNRGVRWIQDLSSHGKVMTVAPGNSGCLYIVFPRKSIVVGINASTGNISWTQNTGPISNEKNLPTVDSNGWMSIGSLDGALYSISPDGEMRKFLGETANGSVIHVGPVLDCSGLSMYVAKTIAEGKSIQTTGDYTYVSVKKPSFILFTLLAPATGTIYWTGEYPGELSNLLSSSDLDDFTVDETVVLTLLSASKTGISNTTQCCTRRQKIASTCRQAKAKFVQADSEAVAISLCCIFWAKKRLQGNGLQKFLEKRHSLHSKRRILGKKISELEQKAAEDVSSNEALGKLGEMVKAKESVERKLSGSYSLGRDEPSLQQQGSLPLYHGKYSSHSFHSSQKESITVFNVLSDTSTSGDGTSSCSSDDSDYESCSGTSSGEMELDVWPSRSAEEAGHSNTANVEEESPT

SEQ ID NO: 2653 - protein, 105 aa, Zea mays
MYRGFLRDLKLPFPTTLPTLHCLTLQIDRVREEHDRAEWARDREARRNRTEARSGRGALGSIADDDAQSPDRASVSLEAGRGEHETLIPDPRARARGGGGEWESK

SEQ ID NO: 2654 - protein, 364 aa, Zea mays
MEKYELLKDIGSGNFGVARLMRNKDTKELVAMKYIPRGLKIDENVAREIINHRSLRHHNIIRFKEVVLTPTHLAIVMEYAAGGELFDRICSAGRFSEDEARYFFQQLICGVSYCHFMQICHRDLKLENTLLDGSPAPRLKICDFGYSKSSLLHSKPKSTVGTPAYIAPEVLSRREYDGKMADVWSCGVTLYVMLVGAYPFEDPDDPKNFRKTIGRIVSIQYQIPEYVHISQDCRQLLARIFVANPAKRITIREIRNHPWFLKNLPRELTEAAQAKYYKKDNSAPTFSDQTVEEIMKIVEEARTPPQSSTPVAGFGWAEEEEQEDGKRSDDDEQYGEDEDYDGEDEYDKQVKHVHASGDFQHLLK

SEQ ID NO: 2655 - protein, 63 aa, Zea mays
MASTAGYLARRAAQKERVRLLYRRALKDTLKCSTGPSTATSSTRTRRISRTSSRPTATWITWT

SEQ ID NO: 2656 - protein, 511 aa, Zea mays
MAVKVWVFAVALMMCAGVGLGADDDGGSRLISRCRLSSPNYRGALAKAILFFEGQRSGRLPANQRVRWRGDSALTDGQPENVNLTGGYYDAGDNVKFGFPMAFSVTLLSWSAVEYRDEVAAAGQLRHLRSAIQWGADFLLRAHTTPTTLYTQVGDGNADHQCWERPEDMDTPRTLYKITRSSPGSEAAGEAAAALAAAYLVFRDDRDKTLATQLLAASRSLFDFANDYRGSYQLSCPFYCSYSGYQDELQWASAWLYRATKDSKYLDFLQNNQGGSATEFSWDNKYPGAQLLATQEYLAGRTELEGYKRGLDSFVCAVMPNSGNTQIRTTPGGLLFTRDSVNLQYTTTATLLLSIYAKALLASAAGAVQCSAATFSPDQISSFATSQVDYILGDNPRSASYMVGFSSKFPRRIHHRGSSIPSIKVLPRKVTCSEGFSSWFPTANPNPNVHVGAIVGGPDGNDQFGDNREDSTHSEPATYINAAFVGACAAALGRSQQVPVDETASAHSDVM

SEQ ID NO: 2657 - protein, 286 aa, Zea mays
MISHTAAITIYTKTGERREMAEATPYEEQRRRQVEANKRKLEELQLHHLSAAIREAAAAAKPSLVKKRKARVPLDVADAVMEPVRRSGRLANLPDKPVYREKVPDFGMKIRRYALGFHLFNQSGLVCMSLANLALLWFGLSSLLSGRTYGSVRRDLTNRVYATDDARSYAISKAEDLEQELDSSFPIFIKPMTQSHVTGGFWLGLPIHFCRKYLPKRDEMITLVDEDDDESDTLYLAMKRGLSAGWRGFAVQQKLVDGDCLVFQLIEQTKFKVYITRASSYYESED

SEQ ID NO: 2658 - protein, 282 aa, Zea mays
MAAAAICVEDEAACAAAECAGIGNLDLAAAGAGAGGKRSVYLMDCAPVWGCASTRGRSTEMEDACAAAPRFADVPVRLLASRRDLDRLGLDADTLRLPAHLFGVFDGHGGAEVASYCRERLQVLLRQELRLLSKDLGETSEADMKEHWDELFTRCFQRLDDEVSGQASRLVGGVQETRPVAAENVGSTAVVAVVCSSHVVVANCGDSRVVLCRGKEPLELSIDHKPDRKDERARIEALGGKVIQWNGYRVSGILAMSRSIGMYIASGTKSWQNDLFPFLSGM

SEQ ID NO: 2659 - protein, 262 aa, Zea mays
MNNPQNPKASAPCTLPPELPKEAVATDEAPPPMGNNNNTESATATMVREQDRLMPVANVSRIMRQVLPPYAKISDDAKEVIQECVSEFISFVTGEANERCHTERRKTVTSEDIVWAMSRLGFDDYVAPLGAFLQRMRDDSDHGGEERGGPAGRGGSRRGSSSLPLHCPQQMHHLHPAVCRRPHQSVSPAAGYAVRPVPRPMPASGYRMQGGDHRSVGGVAPCSYGGALVQAGGTQHVVGFHDDEASSSSENPPPEGRAAGSN

SEQ ID NO: 2660 - protein, 361 aa, Zea mays
MDKYEAVRDIGSGNFGVARLMRNRETRELVAVKCIERGHRIDENVYREIINHRSLRHPNIIRFKEVILTPTHLMIVMEFAAGGELFDRICDRGRFSEDEARYFFQQLICGVSYCHYMQICHRDLKLENVLLDGSPAPRLKICDFGYSKSSVLHSRPKSAVGTPAYIAPEVLSRREYDGKLADVWSCGVTLYVMLVGAYPFEDPDDPKNIRNTIQQIMQVQYKIPDHVHISTECQQLIARIFVANPMRRITMKEIKSHPWFLKNLPRELTETAQGMYYRRDNRVPSYSDQTSEEIMKIVQDARTMPKSSRSGYGWSSEYSDEEEEKEEEHRPEEHEEEEDEYDRRVKEVHASGELRMDALHI

SEQ ID NO: 2661 - protein, 643 aa, Zea mays
MKRQRSYGDGLDDDRRRFYDRGPPPRDYDGDRFDRRKGFGGGGGFHDSRYRDYPSPRGYGGDRALHRSESFSGFRREFPKGFRSERDRSRRDGDGSSTWRRPGSGWTDAECFEEYRAPARLGASSLPGQPRRSRSRSPSEPRRRFEVAKAEKPRKHSAGINEVEEGELSPVAEPKARPAAVEHRKQVESSRVKEKGLEQGKAKKLNSGVQANLGARANGSSSASDPNNAAREEGKKRDDILVAEAMDEVREKSSTMVTEEVVSGGHQVQALHAATTDSSEFGLTTSPMQQGVLQEEVKPQEETTNSVDMVGENTSSTMLKEGIQEEATTRDKTNNDTDEVRESASSNFSQAVQEEVTALHKTGNAAIEVGKNISPLMQQEVLQDAVVELDDTAHAVDEVVKSASSDMLKEVIQEEVVQHNGSADVVDMVDTDTSDLPWEAMQEKTVILDGNDHNFDTVEPVSYSGMLKEAMHEGELTRDETAINTIVAGQGNSTDMVDEVMLGKAAVREVISSAVNSVGESNMSTGLQGEVMVSQNQQAPESKEFEKITVMAEMDEPAEDITPQPVEVELEIHHCKERGTSEETLVVEKDASAMHDNVEKEVKGFDIEAKADRAFMFHKPMKEHAGGSKERSCQSKSYDKGFD

SEQ ID NO: 2662 - protein, 996 aa, Zea mays
MGVGGGGGQAAVSAPAPVPAEEAGKDAEEGGGWTVKAKLIAAAVLVWVLGSAALWVFLHSYFRHAALRKAEEALVSMCEERARMLQDQFAVSVNHVHALAILVATFHYEKHPPALDQNTFADYTARTSFERPLLSGVAYAQRVVHADREGFERHQGWIIKTMKHEPSPAQDEYAPVVYSQETVSYIEGLDMMSGEEDRENILRSRASGKAVLTRPFRLMSNHLGVVLTFPVYHADLPSDAKEEDRVAATAGYLGGAFDVESLVENLLRQLAGNQELVVNVYDVTNISNPLVMYGSEVPLGNPSPSHICMLDFGDPFRKHHMVCRYRNKPHVPWSAISTPSGVFVICMLVGYIAGAAWSRYDNVKEDCRKMEELKKQAEAADVAKSQFLATVSHEIRTPMNGVLGMLDMLLDTDLTSTQRDFAQTAQVCGKALISLINEVLDRAKIEARKLDLESVPFDLRSILDDVISLFSSKSREKGIELDVYVSERVPEILLGDPGRFRQIITNLVGNSIKFTERGHIFVQVHLADHSNLATESKVEPVANGMNGHTDEKTAVATSVSLNTLSGFEAADSRNSWENFKLLLSYEKNEMPYESVSDKVTLVVSVEDTGIGIPLDAQAKVFTPFMQADSSTSRTYGGTGIGLSISKCLVELMGGQINFVSRPHVGSTFTFTAVLKRCDRSAIGDSKPVMLHPLPSSFKGLSALLVDRRPVRATVTKYHLQRLGIACDVVATIELALGVLSGRNGSSLTSMKQPCMLLIESDSWGFNIDVSLRSRLLEMKQNGHTHVLPKIILLAAAESGKLKEHYAVDSVITKPLKASALAACLFQTLGIKQSSNERSDNSGSLYGLLLGKNILVVDDNKVNLRVAAGTLKKFGAKVECVESGKDALALLQVPYKFHLCLMDIQMPEMDGFEATKQIRAMEAKANEQAVACDNSEIDGATRAARWRLPVLAMTADVIQATHEECTKCGMDGYVTKPFEEKQLFQALQKFLDPGMSC

SEQ ID NO: 2663 - protein, 298 aa, Zea mays
MRLFASASSPRLLSPSVSNLTCIAGCGWSPPPPPPPSPPRDYSKLPEPMAAMAPAAVSFLAMALLLLSDAEAKFLPNNITVVGSVYCDACSNNTFSKHSFFLKGARVLIKCSFKVNSTSSEELSLEAERTTDQHGVYKLDVPPVDGFECREGHELRSACRATLVRSSSAACNVPGLGASTQHIELRSRATSACFLNLNALNFRPAKRDGALCHAQGGDDAFGSSLFFWPFLPLFWPPFRVPGGGAGGTVSFPWPFPVPAWLVPFLRPPFLPFPLYEPAPSPPPPFYRFPPPREAVSRP

SEQ ID NO: 2664 - protein, 396 aa, Zea mays
MAAVDTFLFTSESVNEGHPDKLCDQVSDAVLDACLAEDPDSKVACETCTKTNMVMVFGEITTKANVDYEKIVRETCRNIGFVSNDVGLDADHCKVLVNIEQQSPDIAQGVHGHFTKRPEEIGAGDQGHMFGYATDETPELMPLSHVLATKLGARLTEVRKNGTCPWLRPDGKTQVTVEYRNEGGAMVPIRVHTVLISTQHDETVTNDEIAADLKEHVIKPVIPEQYLDEKTIFHLNPSGRFVIGGPHGDAGLTGRKIIIDTYGGWGAHGGGAFSGKDPTKVDRSGAYVARQAAKSIVASGLARRAIVQVSYAIGVPEPLSVFVDTYGTGAIPDKEILKIVKENFDFRPGMIIINLDLKKGGNGRYLKTAAYGHFGRDDPDFTWEVVKPLKSEKPSA

SEQ ID NO: 2665 - protein, 316 aa, Zea mays
MGKDDVIESGAGGGEFAAKDYTDPPPAPLIDAAELGSWSLYRAVIAEFIATLLFLYITVATVIGYKHQTDASASGADAACGGVGVLGIAWAFGGMIFVLVYCTAGISGGHINPAVTFGLFLARKVSLVRALLYIVAQCLGAICGVGLVKAFQSAYFDRYGGGANSLASGYSRGTGLGAEIIGTFVLVYTVFSATDPKRNARDSHVPVLAPLPIGFAVFMVHLATIPVTGTGINPARSLGAAVIYNKDKPWDDHVRKRMRVLTIYDCDYDDAISSFNLSQWIFWVGPLVGAAIAAFYHQYILRAGAIKALGSFRSNA

SEQ ID NO: 2666 - protein, 397 aa, Zea mays
MAYRRVDPEPFLPPGFSASVVLHREVMARSVTRRLPPLHEDWAIINIQPLPDHEVTFLAVRDVVREYLVEHRRLGVRDIQRSHLGQVLVQFSSVLERDNLVLLGPQHYLDAIFTAQRHNDAWNHRALVFNCECWLMLLGFPLDYRSSEYLQAAIGSFGRLLLWEEDRHNVYRTMLRVRVTSREEVPQFIVFSEADVFIGDSWTVQCEIIQQTLLGGQAQDEDPVPVAPEDGQQLPLKFFGLGQPVPAAGWDLNLPPEDNAPVQPADNIHGDWDQRIVNDPPAQQPQQDLPPDEQQVSNPNSYLSSDSSSGHIHGVPVQNGQILDDLDVVGTVLPFNAPALPAVGGAPLNGLQVIDGPPIQGDLQVPRDNFIPDAQPVEPNINGPNNVMLNYMFTQDW

SEQ ID NO: 2667 - protein, 683 aa, Zea mays
MASTEQLASSPAGGPPGPKARAAPPPESSSSPPPPPKASSSSPPPPTPPPPPSKQSSPPPPAHNSTTSPNTPATPPEKSPAASPPPPASPPPPSRSSPPPSPSSPPPSPPPQSSPPPPAASTSQQSPPAPEPTKPPTPPSSEKPGAAAGTTASSPPPNAGQPPPRETPSTPPDTAGHQPPPPAPTQMLPPPMALTVIMPGGVSGGPPAGGMWRSPPGPPAGGGGSGSNSNMKNEAVVIGISVAGLVLALASLLIIACATGKQGNRGRKRERHASRRHSIVVPERQCGAAAGVVSADVYQPSNGPAPSPSPSGTSSSYDLSGANKSWFTYDELAGITGGFSAANVIGEGGFGKVYMGALGDGRRVAVKQLKLGSGQGEKEFRAEVDIISRIHHRHLVTLVGYCVTENHRLLVYEFVANKTLEHHLHGKGLPVMDWPKRMRIAIGAARGLTYLHEDCHPRIIHRDIKSANILLDDAFEAKVADFGLAKLTNDSLTHISTRVMGTFGYMAPEYAQSGKLTDRSDVFSFGVVLLELITGRKPVDASQPLGEESLVEWARLLLVDALETDDFREVADPALECRFSKTEMRRMVEAAAACVRHSAAKRPRMVQVWRSLDVDECSSDLTNGVKLGQSMAYDSTRYSADIELFRRMAFANDLSTAELGVVDEDDHRYHNSSKASSSSRRYK

SEQ ID NO: 2668 - protein, 526 aa, Zea mays
MSKKKAVTTMTLKDFHGGSIPSELPLPSAPGVTPRPADRTVASASPVAAAVARPRVPVASPAAAAAAAAMPSFLTNPSRIGRHFDEDERTPFEPTTPRRPAPSPTSFAPAPVVAPTRSGPGNAWGPKKEASSAPSPVGHAPASAGDQIWSATRIAQASAVEKVISGRWHPPKPTSPPAPVSVPVLETPVAPPEIERPRSVGVRELDSGVERGAAPVRPASHEGRIGEGRAGEVPERPKLKLLPRSKPIEDPEQRPTYVEAKQVHQVQVTAGLMKAEDNHDLHQNARATETGVLGADAESRVAERPRLNLKPRSYVTGQSDEIAVKERPSLFGGARPREQVLKERGVDVLASDLEKTSPVGRPKGEFAKVEQKVEAMSINPSVERHESFAAGHRGPRNGDKKDHKWNTDRADAYRLTRREDNRRVARDMEKPQEQPRPEPETWRKPVEPPKLEVATPRFGKAATALELAQAFSTSMSDTAPQSRLTSAPSPRVPPSPGASRDQSGFSRLTDSRTLHSGPSQRKINGY

SEQ ID NO: 2669 - protein, 69 aa, Zea mays
MPKQIHEIKDFLLTARRKDARSVRIKRAKDAVKFKVRCSRYLYTLCVHDADKANKLKQSLPPGLTVQEI

SEQ ID NO: 2670 - protein, 431 aa, Zea mays
  misc_feature (380)..(413): Xaa can be any naturally occurring amino acid
MMLPTATATAVFLTAAPSSFSTRRRRSRAIFASLSPSFSASEEPLLVRAARGEDGLPRPPAWMMRQAGRYMAEYQALAKRHPSFRERSENTDLIVEITLQPWRAFAPDGVILFSDILTPLPAIGVPFDISDSKGPVIQSPVRSKEQVRELVPIDLDMLQFVGESLKILRNEIDGKAALLGFVGAPWTIATYIVEGGMTNTYTNIKSMCHTAPDVLKGLLSHLAQAISDYIIYQVNSGAQCIQIFDSWGGQLPPHVWEQWSKPYIKQIVSRIKKECPNVPLVLYINGNGGLLERMKNTGVDVIGLDWTVDMTDGRRRLGNGISVQGNVDPAFLFSPLPVLTDEIHRVVKAAGPKGHILNLGPWCTSETPEEAVAHFFDVTXXXXXXXXXXXXXXXXXXXXXXXXXXXXXXXXXXRKQPFKYGPLESDSNVGH

SEQ ID NO: 2671 - protein, 267 aa, Zea mays
MSSGSFMTSQQGTRFSSFPVPRPEPSWPGVIKSEDSGSYYAHQRHPVLSSRPHFAGGGSTPPAYSSKEGRRFPFLQDGCDQQQVGGFSAGAGAQQLEVSSTSTVCQPLLKAAAAAAPPPPPESSSSNKMFSDGLAPAVLDSDCALSLLSSPANSSSVDVGRMVVHQPAEHIPMAQPLVPGGLQQQQQHHPFGGSPAWFACSQAGSSAVSAGGFACPPGVESEQLNTVLVPSSDGGGHDMNMNYHGIFHVGGDGSSDGTSPSLPFSWQ

SEQ ID NO: 2672 - protein, 226 aa, Zea mays
MHAPAPPSSVDLPLSAPPPPVKAPSPRPPPPASLQPESPGVFFSATAPLGTSHRRIAIAVDLSDESAFAVRWAVANYLRSGDAVILLHVRPTSVLYGADWGAVDVSLPIPSAYSEDGFGGGDADSEAAAARRMEDDYDAFTASKADDIARPLKEAGIPYKIHIVRDHDMKERLCLEVERLSLSAVIMGSKGFGSTRRTSKGRLGSVSDYCVHHCICPVVVVRFPDE

SEQ ID NO: 2673 - protein, 875 aa, Zea mays
MTMTSPQALSAGAVTVEDDGGLAVPLLADGSGATKTEEECGAEAEGKYWVAADEAERQAVTDCGAEDGRALLFRTYKLRGAILHPYRALILVRLVAVLLFFVWRIRNSASNVMWFWATSVAGDAWFGFSWLLNQLPKFSPVKSVPDLAALRRHYDLLPADDGAASKLPGVDVFVTTADSVDEPVLYTMNSILSILATDYPADRLACYVSDDSGALVLYEALVEAAKFARLWVPFCRKHCVEPRAPERYFETEPQGGRASQEFVNDYKRVQMEYDEFKVRLGNLPDTIRKRSGTGSMRASEGDAQGTWMADGMQWPGTWMDPTEKHRKGHHAGIVKVVLDHHPSRGHHGPRAGAGAGAENKQSADDFGAAAGLRLPMLVYVSREKDPNYDHNKKAGALNAQLRVSALLSNAQFVINFDCDHYVNNSQALRAAVCLMLDQREGGDTAFVQFPQRFDNVDPTDRYGNHNRVFFDGTMLALNGLQGPSYLGTGCMFRRIALYGVDPPHCRQQQLESVAPEPASKYGKSTALIHSVSEAMGERERLTTPPPVPPLDVEMVVAASYDGGTDWGKGVGYIYGIATEDIVTGFRIHGKGWRSMYCTMRRDAFRGTAPINLTERLHQIVRWSGGSLEMFFSRNNPLVGGQRLKLLQRVSYLNMTVYPVTSLFILLYALCPVMWLVPEEVHIQRPFTRYVVYLLITILMIHMIGWLEMKWSGVAWLDHWRNEQFFMIGSTSAYPIALWHMAKKLLTRKGIHFRVTSKQTTAGTDDKFADLYEMRWTPMLVPTAFVLVANVGAVGVAMGKALVYMGVWTVAQKTHAALGLLFNVWIMLLLYPFALAIMGRWAKRPIILLVLLPAVFAVVGTIYVALHFLLANVIPI

SEQ ID NO: 2674 - protein, 396 aa, Zea mays
MGKAGRWLRSFLSGKKDRQAAPPKDKRWSFRRPPPAAQEGTAADQHHHGPPLGLPAPGVDELDFDQKKHAVAVAVATAAAADAAVAAAHAAAAVARLSSRAAPRFAPPPCLVEDAAAVRIQATFRGYLARTALCALRGIVKLQALVRGQLVRRQANATLRCMQALLAAQSQLRAQRMLALQLHDHHHPTPPRPRQSPQHPRHRRSYEMDRSCEDNAKIVEVDVGEPVRRGAAGKDRQLYAGGRSSPAPSLAATELLSPRAYSAHFDDLSVANTAQSSPRQAPEACCPGYMANTESSRAKARSQSAPRQRTDALERLPSRRKQGTPPRAAARMHLQRSSSLAGNYSSPWSSSAARLDVSAASLKDSECGSTSSVLTAATLYSRTRSLVGSEVRRGLY

SEQ ID NO: 2675 - protein, 427 aa, Zea mays
METQAPEKENYLPEKDARSAREKAIDEWLPITSSRNAKWWYSAFHNVTAMVGAGVLSLPYALSELGWGPGIAVLVVSWVITLYTLWQMVEMHEMVPGKRFDRYHELGQHAFGEKLGLWIVVPQQLVVEVGVNIVYMVTGGRSLKKFHDVLVCGDGGASCEGKDNIKTTYFIMIFASVHFVLSQLPNFNSISGVSLAAAVMSLSYSTIAWGASVDKGRMAGVDYHLRATTTPGKVFGFFGALGDVAFAYAGHNVVLEIQATIPSTPEKPSKKPMWKGVVVAYVVVALCYFPVALIGYWAFGNSVQDNILITLSKPRWLIALANMMVVIHVIGSYQIYAMPVFDMIETVLVKKLRFPPGLTLRLISRTAYVAFTMFIAITFPFFGGLLGFFGGFAFAPTTYFLPCVMWLAIYKPKRFSLSWFTNWVRKS

SEQ ID NO: 2676 - protein, 475 aa, Zea mays
MPRSGGGGNGGGISSSSRVMPNLPAGFRFHPTDEELMVHYLMRQAASMPCPVPIIAEVNIYQCNPWDLPAKALFGDKEWFFFSPRDRKYPNGARPNRAAGSGYWKATGTDKAILSSSTPTSHGGANIVVGVKKALVFYGGRPPKGTKTDWIMHEYRLSGAADDDCKGSTRRRVSSSSSSSMRLDDWVLCRIHKKSNDFQLSSSSEHEHEQEEPAAGGSATTVEELDALVVVDNSSSSDTTTTTITTNDNNSTETAATHHDPQTMMMLSKSCSLTDLLDSIDYAALSSQMLLLDAPHPHADDPPPHMVYYPPAASATHQQAIIANNTNSNDDYYDDDNLLPTAAATAVDAAAAAVLLSSSPADTNGVNKRKRVTAVDYYGAAEPPTFFHHHLDDGGNSFFSTTKKLKPPPPSDSRHGGHFGTATASSYRDSQQLVDSASSSGVFFHQYGYGYSSSNPFLNLNQQQQLLLNSHIGMQ

SEQ ID NO: 2677 - protein, 391 aa, Zea mays
MAAVAEEEVIVVGAGQSGLAVAACLSLRGVRALVLERDDCVGSLWRKRAYDRLHLHLTKKYCALPHAPHPAEAPAYLHRDDFARYLDGYAARFAVRPRLRREVRSARYDPASARWEVEAVDLGTGQAERYAARFLVVASGENAEKFLPEVPGLEAFPGQVMHAVEYRSAEGMRGKAVLVVGSGNSGMEIAYDLAAAGAVTSIVVRGELHLVTKEIWNVAMTLYPYLPVWVIDKLVLLMCAVVFGDTSRHGLRRPAIGPFTMKLTTPGYPVVDVGTYAKIRSGEIRVLPAAVKSVRGNVVEFGDGSRHPFDAIVFATGYRSTVRRWLKSEDGLVGDDGMAARSYPEHWKGDHGLYCAGMVRRGIYGSCEDAELIAADISKLLHPKQEQGNGV

SEQ ID NO: 2678 - protein, 736 aa, Zea mays
MSSRSSLLPLPLLLLCAAAAAASSRNAELDALMELKAALDPAGRALASWARGGDPCGRGDYFEGVACDARGRVATISLQGKGLAGAVPPALAMLPALTGLYLHYNALRGEIPRELGALPGLAELYLGVNNLSGPIPVELGRLGSLQVLQLGYNQLTGSIPTQLGHLNKLTVLALQSNQLSGAIPASLGDLPALARLDLSSNQLFGSIPSKLAEIPRLATLDLRNNTLSGSVPSGLKKLNEGFLYENNPELCGAQFDSLKACPNDGNDDGRTPRKPESTSVKPQQIQKTADLNRNCGDGGCSKPSTLSTGAVVAGTVVIVAGAAACGLSAFSWHRRQKQKVGSSSVEHLEGRPSLDRSKEAYQRSAVSSLMNVEYSSGGWDTSSEGSQSQHGVARLSSSTEGGSPSVRSFNLEEVECATQYFSDANLIGKSGFAATYKGVLRDGTAVAVKSISKNSCKSEEADFLRGLRTLTSLRHENLVGLRGFCRSRASGGCFLVYEFMANGSLSRYLDAKEGDAADAAAVLDWPTRVSIIKGVAKGTDDSELADYFLALSYRIVSYTLLFGTDFLCGSLDFFFSFSLSGIEYLHSSKLAHQSISADKVLLDHLYAPRLSGAGLHRLLADDVVFAALKDSAAMGYLAPEYATTGRSTDKQGDVYAFGVVVLQVLAGRRAVSPPHLQQGGGGGGRLDDLVDPRLRGRFSRAEAAKLAGVALLCTAEAPAQRPTMTAVLQQLGTSSQ

SEQ ID NO: 2679 - protein, 533 aa, Zea mays
MSARRAAKSQHAAATPRTINLNLARRPGGGRPSRGAGRAQTRPAPPQPARQVQVNLGALFEMERRVRGLESAPPSPAPASQSQEDAEEREEKWQFQAEILRAECNFLRMEREVALRKLDRHRGQMEAALKSAVETLVSGRKKVDGKGDVGVAAALDEGIEDLEEMMEELRVEKESGRRAMGGARELQRSRGRNFDRQASSLRRRLEKMPPANPDPLVKDIREIALPVPAPPPPPPAAEQSGDDERVHGANTSDVEMLRMKMEGMSKGMRERMAEYSRRLEAVASGDNAGCQSRKCGNRHSRKASAGSQRSWSGGSTASNGNAPSALDAGPHARSRQNVAAEKRQQQHVIMSGECKLVGSASCRDCREIMWKIMEQVNAESDQWTEMQDMLEQVRLEMQELQSSRDTWQHRAMASDISLRSLNSQLLEWKNRGQAYEQRAEELHRKISELESKLHTSKAHLPAPAVIPNQNQWSDACKMEHPRGNPQHQPSKEPGKEEIKKHVLICRVKHSPSSVLPKRSPFQEIGNIRLPRHR

SEQ ID NO: 2680 - protein, 198 aa, Zea mays
MAECKDDDSGRRSPSSSMDSSTHPPALSTASSASRRPPERRDQLSPDLQLGLSLSPASSALLVAETNNSIVPSTPRNQALPDWPPIKPFLRSALTASARRRRTLFVKVYMEGVPIGRKLDMLLLDGYSSLLAKLCHMFKASITYADAVEYHQRVPHEKAAHVLTYEDHDGDWMMVGDVPWELFLGSVKKLRIARTDRC

SEQ ID NO: 2681 - protein, 323 aa, Zea mays
MARLLLWWTALLLPSLLAGVGPAAAAAASPPHDACLVPTIAQSVLRTPDTCSTLDRRLGDPVGVIEGDEVTLARAVNLLHANKDDYIAVLFYASWCPFSQECKPNFETLAYLFPAIRHFAFEESAIRPSIISRYGIHGFPTLFLLNSTMRVRYHGPRTVKSLAAFYTDVSGINASVKSTAGEAMVHPLDDIEHKKDAEQENCPFWWARSPENILQQDTYLALATVFVILRLLYRIFPKIDSFTRWAWRRHNMFAKLMGAHEYFLTYLEQARQKFHRLYPSSSKRGNLQEGAMNATAWASKSLASVSIGEPSAIGRTNSTSELR

SEQ ID NO: 2682 - protein, 302 aa, Zea mays
MAQEDVHLDDAGLALGLSLGSGSGGGASAAARHGTSRSRLSTEAPLQSPHPLEPSLTLSMPDEATATATGGSGGSGGAAHSVSSRSVEGVKRERVDDAEGERASSTAAAPRAGAGAEDDDDDGSTRKKLRLTKEQSKLLEDRFKDHSTLNPKQKIALAKQLKLRPRQVEVWFQNRRARTKLKQTEVDCELLKRCCESLTEENRRLQRELQELRALKFAPHPQAPPPSATQAGAAAGVVPAPPPPLYMQMQMQLPAAATLSLCPSCDRLAGPAGAAAKAEPRPDRPKTATHHFFNPFTHSAAC

SEQ ID NO: 2683 - protein, 231 aa, Zea mays
MMNCAGGGDPVEDFLISGAVDDEDLAIFCDGGLGIEGVNGDACGFEQSNLGKRGRDEPCSSGLKSKACREKMRRDKLNDRFLELSSVMNPGKQAKLDKANILSDAARMVAQLRGEAEKLKESNEKLRENIKDLKEEKNELREEKVRLKVEKDRLEQQVKAMSVAPTGYVPHLPHPASYHPAAFAPFVPPQQAAGNKSAPIPAPFPGMAMWQWLPPTIVDTTQDPKLWPPNA

SEQ ID NO: 2684 - protein, 1538 aa, Zea mays
MPTLLNGGGKGTPVNIIVGSHVWVEDPNLAWIDGEVISIKNNEVHVQTSNGKKVTTDRSKVFPKDMEAPPGGVDDMTRLSYLHEPGVLQNLATRYELNEIYTYTGSILIAVNPFQRLPHLYDTHMMEQYKGADFGELSPHVFAIADVAYRAMINEGKSNSILVSGESGAGKTETTKMLMRYLAHLGGRSGVEGRTVEQQVLESNPVLEAFGNAKTVRNNNSSRFGKFVEIQFDKTGRISGAAIRTYLLERSRVCQINSPERNYHCFYFLCAAPPEYTQRYKLSDPRSFHYLNQSSCIEVDGINDAEEYLATRRAMDIVGINEEEQEGIFRVVAAVLHLGNINFAKGTEIDSSVIKDDKSRFHLNIAAELLKCDCQNLEKALITRVIVTPEEVITRTLDPASAVASRDALAKIIYSRLFDWIVEKINVSIGQDPNSKQLIGVLDIYGFESFKVNSFEQLCINYTNEKLQQHFNQHVFKMEQEEYTREEINWSYIEFVDNQDVLDLIEKKGGLIALLDEACMFPRSTHETFAQKLYTTFKNNKRFAKPKLSRTDFTVVHYAGDVTYQADYFLDKNKDYVVAEHQDLLNASSCLFVAGLFPPLPQETAKSSKFSSIGSRFKLQLQSLMETLSSTEPHYIRCVKPNNLLKPAIFENTNVIQQLRCGGVLEAIRISCAGYPTRKTFYEFVNRFGVLAPEVLEGSNDDKIACQKILEKMGLENYQIGKTKVFLRAGQMADLDARRAEVLGRAARIIQRQIRTYIARKQFAELKRSATQLQSFVRGTLARKLYECMRQEAAAVKIQKNMRRHKARESYLQLQAAAITLQTGLRAMSARKEFRFRKETKAAVHIQAQWRRHRDYSHYKNLQGAALTYQCAWRQRLARRELRKLKMAARETGALKEAKDKLEKRVEELTWRLGLEKRLRTDLEEAKAQEIAKLQETLHDMQLQVEESKAMVVKEREAARKAIEEAPPVIKETPVLVEDTEKINSLTTEVEQLKALLLTERQATEAAKREHAESELRNEELIKKFESAEKKIEQLQETVHRLEEKATNMESENKVLRQQAVAISPTSKSLAAYPKSPFQLKTPENGNALNGEVKSSPDITPILPNPKELEAEEKPQKSLNEKQQENQDLLIKCVSQDLGFSSGKPIAACLIYRCLLHWRSFEVERTGVFDRIIQTIGSAIESQDNNDKLAYWLSNSSTLLLLLQRTLKTTGAAGFTPQRRRSSAASFGRVFSGMRASPQSAGRAFMGSRLIGGLGDLRQVEAKYPALLFKQQLTAFLEKIYGMIRDNLKKEISPLLGLCIQAPRTSRASLIKGSRSQANALAQQTLIAHWQSIVKILTNYLNVLKANYVPSVLISKVFTQIFSFINVQLFNSLLLRRECCSFSNGEYVKAGLAELEQWCIYATEEYAGSSWEELKHIRQAVGFLVIHQKPKKTLKEITNDLCPVLSIQQLYRISTMYWDDKYGTHTVSSDVISSMRVMMTEDSNNAVSSSFLLDDDSSIPFSVDDISKSMTEIEVTDVDMPPLIRENSGFTFLHQRKD

SEQ ID NO: 2685 - protein, 687 aa, Zea mays
MARTPADAGSGPHADSAPLHPERISSCRARSSPNRHPPRVQGALPAGVARRREVPEPRAPPPIKLQPFSPGSRIPLAARALSVSSPPPHKKPLNCSVGVMCGILAVLGCSDCSQARRARILACSRRLKHRGPDWSGLYQHEGNFLAQQRLAIVSPLSGDQPLFNEDRTVVVVANGEIYNHKNVRKQFTGAHSFSTGSDCEVIIPLYEKYGENFVDMLDGVFAFVLYDTRDRTYVAARDAIGVNPLYIGWGSDGSVWMSSEMKALNEDCVRFEIFPPGHLYSSAAGGFRRWYTPHWFQEQVPRTPYQPLVLREAFEKAVIKRLMTDVPFGVLLSGGLDSSLVASVTKRHLVKTDAAGKFGTELHSFVVGLEGSPDLKAAREVADYLGTTHHEFHFTVQDGIDAIEEVIYHDETYDVTTIRASTPMFLMARKIKSLGVKMVLSGEGSDELLGGYLYFHFAPNREELHRETCRKVKALHQYDCLRANKATSAWGLEVRVPFLDKEFVDVAMGMDPEWKMYDKNLGRIEKWVLRKAFDDEEHPYLPEHILYRQKEQFSDGVGYNWIDGLKAFTEQQVTDEMMNSAAQMFPYNTPVNKEAYYYRMIFERLFPQDSARETVPWGPSIACSTPAAIEWVEQWKASNDPSGRFISSHDSAATDRTGDKLAVVNGDGHGAANGTVNGNDVAVAIAV

SEQ ID NO: 2686 - protein, 211 aa, Zea mays
MRRRGVAAAEADGDVELRFRGVRKRPWGRYAAEIRDPAKKARVWLGTFDSAEDAARAYDAAARMLRGPKARTNFPLPAAAALHHHHMPAAAAAAAPPYTTYPTATGVSTPPVARPACSSLSSTVESFSGARPRPVLPPRFPPPSIPDGDCRSDCGSSASVVDDDCTDAAASASCPFPLPFDLNLPPGSGGGAGVGFYADEEDELRLTALRL

SEQ ID NO: 2687 - protein, 212 aa, Zea mays
MGKGFASYLAMKTGPEGGDAAAAQQALIDADLRELGVAARKLANHAFVLGGGLGFGTSFLKWLAFLAAVYLLILDRTNWKTNMLTALLVPYIFFTLPNVLFSLIRGEVGKWIAIIAVILRLFFPRHFPDWLELPGSIILLTVVAPSLFADSFRGDLVGVFICLVIGCYLLQEHIKASGGFRNAFRKGNGVSNSIGILLLFIYPVWAGVLQVL

SEQ ID NO: 2688 - protein, 553 aa, Zea mays
MARKRRAPSPPPPPQEESSSEESGSEELEEPPRLPELRSPPQAAANNADSSEADTDSDTDAQAFQMRQVPRSLTKHTHPVPQPESDPEEEEGESSESEHENPVPVVQKKAAAAAVLSKAEQERKRPPSDPAPTGKAKKMKAVATPLAKAKKGKAELEKPAPEATPAGNAKKGKAELEKPTFDAIPAGKAKKGKAKEAAPEATPSGKGKKDGDKLEKSAALDPSHSDSKSEKPVRPTWGKDDEMKILEALAAHVKREGELPKTDLLLASVRDHLVRKNCTYSDIYEKVRRLKERYKKAASTGIVPSKEDGLQMYNLSEAIWGEKAMEAAAAVTSQKGGAVIKGKKGQANKEKMLENAKSDVTKESAPSTANQSGDSQKASKKGQARLSEEATTTASPSKSKKQESHNGELNKDDGNLAKGKKGKTDKGKMDIDMDRLTPKEPVNANQNGGIVIRSKEGEINDEGTEGDANVQGVHRRFGELQKLYSNLAVYVEEIETHHPCGETLKRVFEFIADEKAEDLESKIKKLRVAQAKAEVRQGNIKKEVLNLMLSLVD

SEQ ID NO: 2689 - protein, 197 aa, Zea mays
MAAVKFLPEASLRTDLSFPLLIFPARACSVHGRVQPLQHPAGSSMVRATCSSLPQPRSTKRSCALLAPWSFFLRTRRALSLEFPRCSAHRARLFLPCAQLCPLLGFLLAAPPVPPGRSSSFRPRALSCARSAEAPAPHARPSVSARISALPSCSSSLLALLHGRCGLAGVVPALAAVVARAAPLSSPLRTRPPTFLP

SEQ ID NO: 2690 - protein, 153 aa, Zea mays
MAASSLSSTRPDLPWCAPPAPPCPSRVRPNVPAPCSLPGASSCARAVLSAWNSPVVQLIAPGCFSPARSCALYSDSCWPRPLFLRAGQVLSGRELSHVRVQPRLLLPTRVPRYLLGFRPCPVVPPLCSLSSMAAVGSPAWSLPWPPWWRALLP

SEQ ID NO: 2691 - protein, 516 aa, Zea mays
MVSESNRGGADRTTAAGEERGQLLFDVPEIRFTKLFINGSFVDAVSGRTFETRDPRTGGVIASVAEADKEDVDLAVRAARAAFDHGEWPRMSGSERGRIMARLADLVEERADELAALESLDAGKHPAVTRAVDVGNAAGSLRYFAGAADKIHGETLKMPGQFQGHTLREPLGVAGVIIPWNFPSTMFAVKVAPALAAGCALVVKPAEQTPLSALYLAQLAKQAGVPDGVINVVPGFGPTAGAALASHMDVDMVSFTGSTEVGRLIMKASAESNLKPVYLELGGKSPLIVFDDADLDMAVELAVGASFFNKGEACVAASRVYVQERVYDRFEERLAERMRSWVVGDPFSDPSADQGPQVDKAQYERVLSYIDHGKREGATLLTGGRPCGPEGKGYYIEPTVFTNVKEDMIIAKEEIFGPVMCLMKFKTVEEAIARANDTRYGLGAGVVTRDLDVANRVVRSVRAGVVWVNCYFAMGSDCPFGGRKMSGFGKDEGMHALDKYLAVKSVVTPLRASPWI

SEQ ID NO: 2692 - protein, 384 aa, Zea mays
MTNQDVVVPDMGIAAAAALPPPGLFACRGVAGAVSSLRGTYGSLGLPGGAAADGGEFRSPVAAAANAPPGRTSCTSRVVEAIRASSPARCPAVDEYDAWTRKHPSALGSFDQIAAAAKGKRVVMFMDYDGTLSPIVADPDMAFMTPEMRAAVRNVAKRFPTAIVTGRCIEKVCSFVGLPELYYAGSHGMDIKGPNSKEDKTVLLLQPAREFLPVIDKAYKALVEKTKDTTGARVENNKFCLSVHFRCVDEKSWSSLAEKVKAVLRDFPELELTEGRKVVEVRPSIMWDKGKAVEFLLRSLGFDDDRTNVLPVYIGDDRTDEDAFKVLRERGQGIGILVSKCPKETDATYSLQDPTEVMEFLVRLGQWNPLRSPSPAARPRGRKQ

SEQ ID NO: 2693 - protein, 468 aa, Zea mays
MRRRAEVAVVGAGAAGLVAARELLREGHTVSVFEKSGRVGGTWAYSPRADADPLGSDPGAPGAVHSSLYASLRTNLPRELMGFSGFPLAGRAFAGDPRTFPGHREVLAYLDAFAADSGVAPHVRLRAQVLRVRPLCPGRGQGEKWAVAWRGEDGDVAEEAFDAVVVCNGHCSVPLVPKIRGINKWRGKQMHSHNYRTPEPFQDQSVVVVGLGASGIDIAREISHVAKEVHISARYSEGRLGKIELYHNAWMHSEIECIQDDGQVRFAEGSSVAADTILYCTGYRYHFPFLDLDGFTVDDNRVGPLYKHVFPPKHAPNLCFVGLPYKVGDLNGYMHIVEIEAIWSSRLLIQRARFLACASQSIIFQALELESKWVAAVLSGRAELPVEEDMTADVEEEYQRMEDAGKPKRHTHTLWPRWVEYLNWVADQVGEAHLEPRKCEMYEKALKCVWSLDEGYRDRWEEESIGSG

SEQ ID NO: 2694 - protein, 754 aa, Zea mays
MLGSKTKSGSAEAKSNGKPDKEKKGGGGGTPPTPKDSKPRKPAVPKASAAGHGTPRAADKSPGSGSADRKAPTPKAAASRLATTPEKGKPAKPPQEQHAQLAAIREELVKAKEQLVENEKEKCKVFAELERAKKVADEANAKLQDALDVQRRAIEAQEADKLPARESEQASIHGQQEADDAVLRSTVEQLEKARYELADAIDAKNEALSQVDDAVRASEVKAQEVEHLTVEVTRLKGLVDSKVDGNRKKTAERIQNLEEENFALKLELEKKKAAEEKAVRLERMIDELKSDVDDARNFGSKSKQLADEWQKKAQLLEVRLEEADQSNILKGESLNSAMEELDSTSSLLRDRESEVAALRDKVRFLEDELTKLKSDIVVSGQRADAAEKETTDLWTEIEGLRLKLHTVEEEKMEALNSDKNTSSEIETLNEQKNQLADELEASKDELEKIKKAMEGLASALQEMSAESREAQEKYLLKQDEMERAQAQVEELNLSLKNIKENYELLLDEANYEKVCLTKAVERLEAEAKRAHEEWQSKELSFVSSIKNSEEEIVAVRVQMDRTLEVVKEKENENTELQEKLQQLESQLMEANRIREEGNTETIRWKENILDQENELQNIKQENDDLQAKESAASEKIKELSSQLTNAKDGTINSNTKDGDNEKGGTEEDDEPVVVVAKMWENSKFADYDSAKEENDGDSQVDLESNKGDAGLDSNGLHSTKENSGRASPTKQHQQYKKKPLLKRFGGLLKKKSEN

SEQ ID NO: 2695 - protein, 311 aa, Zea mays
MAASVALSSGHRMPAVGLGVWRMEKADIRGLIHTALRVGYRHLDCAADYQNEAEVGDALAEAFQTGLVKREDLFITTKLWNSDHGHVLEACKDSLKKLQLDYLDLYLIHFPVATRHTGVGTTSSALGDDGVLDIDTTISLETTWHAMEELVSMGLVRSIGISNYDIFLTRDCLAYAKIKPAVNQIETHPYFQRDSLVKFCQKHGICVTAHTPLGGSTANAEWFGTVSCLDDPVIKSLADKYGKTPAQLVLRWGLQRDTVVIPKTSKVERLQENFDVFGFDISGEDMERMKAIDRKYRTNQPAKFWGIDLYA

SEQ ID NO: 2696 - protein, 559 aa, Zea mays
MSALYGQLKKTLTLRRDSSTTNSRSHLLKSLPHLLTRDATPIRHPLIHLAFCFLQRFRPSTRQILVHDLTLFRSQAATPKPKPYPPISSSQPAMMAAEPSPSVPSTAAEDMETLALDSSSSSAAATASASDPLLRPPTSPTAAASDDPFVIDDFLDEDDFTAPPPSVAGPPPAVLGDAASPVFPKITVSDPKKHAEPSGGGAAGVIPGSGSYFSYLITTRFAGGGGEVRVRRRFRDVVALADGLAAAHRGLFVPARPDKSVLEGQVLQRHNFVSQRCAALQRYLCRLAAHPIVGQSPGLRTFLTEPGAIPAFQSEAPRYWTTTVNAAAPMVQMKAGRDLFGMFKGLKQTMVNGMVATKPPPVEQETDTEFLAHKARFEDLQQQLTTTSQQAEALVKAQDGYRETTGHLGMTLIKLAKFEREQATCNSLRRRSGEIHNFANSVLKMSRSQIKLNSEIVKHLGSIHEYLEMMISVHHAFTDRSNALHYVQILSADLFSLHIRARRLESSSARDMGHEWSTYQKVEGLKETIRSAEAAKSDAVREYESIKVSCLKQCNNNVP

SEQ ID NO: 2697 - protein, 586 aa, Zea mays
MGGGGTLMLDQRLAADDKVLFGFPAGECFFGEGDLANPAPATEEMTMSFLPLDADEMMMSDDDDVDGVEELERRMWRDRVRLRRLKEQQQQSGRPSGGKHEASRSRQRQSQEQARRKKMSRAQDGILKYMLKMMEVCNAQGFVYGIIPENGKPVTGASDNLRAWWKEKVRFDRNGPAAAAKYQADTAAAGGGAADGCGGADAEGQHHSLHELQDTTLGSLLSALMQHCDPPQRRFPLEKGVPPPWWPLAAVPGDLGPPPYKKPHDLKKAWKVAVLTAVIKHMSPDVDKARRLVRQSKCLQDKMTAREIVAWLAVLRQEEELYIQLHPGARPAPSSAAMFPFCASSGEYDVDGEDDTGRNQQPTSNPAAAAFLDLSSSFMDDAGHNKFVVAEPAPPIKQEAADAVFFQKRSAPAAAVEPELMLGGSFRRAYTCGNVQCSHSSSAHGFLDRNTRNAHQYSCMFNNSVGQTAALGGLDLDLPLDGQRSLGELMDMYEANVGNVDTAAPGPEVQLPGPFPTPCRFGDIISNVIQQSAAAAVYVRDDDAQFGGDIAAASPGLRFGSGLDVAGGGGLQQPHKSTGSNGSWFY

SEQ ID NO: 2698 - protein, 753 aa, Zea mays
MASSAHALLLTLLIATAVLSTAPALCYVSPGSNLHHDKHSAPGYRTHIVLVRPPSDAEAADESAHRLWHESFLPSSLTDSVEPRLVHSYTEAFSGFAARLTDAELDAVTKKPGFVRAFPDRTLQPMTTHTPEFLGLRQGSGFWRDVAGYGKGVIVGLLDVGIYGAHPSFSDHGVAPPPAKWKGSCAGSASRCNNKLVGVRSLVGDDARDDFGHGTHTSSTAAGNFVAGASRNGLAAGTAAGIAPGAHVAMYKVCTGAGCTDSAVLAGMDAAIRDGVDVISISIGGNATLPFDHDPVAIGAFSAVAKGITVVCAAGNNGPKLASVVNDAPWLVTVAASSVDRSFVAEVELGNGVTVAGEAINQVTNASVKPSCHPIPILYSEERRNCTYHGEDEHRVAGKIVVCEAVDNLLPYNTSEKSILRDIKDAGAAGVVVINTKADGYTTVLYDYGSDVVQVTAAAGAKITKYVTSSSSAASAVRFSHRTLLGVRPSPTVASFSSRGPSTVTPGVLKPDVLAPGLNILAAYPPKTPLGTGPFDVMSGTSMSTPHVSGVAALIKSVHPNWSPAAIKSAMMTTSDNVDRSGGPVLDEQRRKANAYATGAGHVNPARATDPGLVYDLGAAEYASYICALLGDAALAVVARNSSLSCAELPKTPEAELNYPTIKVPLQEAPFTVNRTVTNVGPAASTYTAKVDAPMSLAVRVSPGTLVFTKAGEKKTFSVTVSGHGDGVLEGSLSWVSGRHVVRSTIVAAGRSR

SEQ ID NO: 2699 - protein, 667 aa, Zea mays
MFLAKRPPWSSQISRFCILPFHAVPWIVLWTRRVRYSGGSGDNATPVASGRLSKLFWPARMHVADVIGRVLERGQSLDSVELELERLHVDLDPFVVNRVLRSISDSEMAVRFYWWAESRPGFDHTQFAIAYVVSLLFVDSNFFLLSEFLERVRSQGVALHRSLYRILLSGYVRAGKFDSVIHTFDEMVTSGCREFGVDYNRFIGVLVKNCCFDLVEKYYSVALDKGFCLTSFTYSRWISALCQSERIELVERLLADMDKFGCFPDIWACNIYVDCLCKHNRLHDALKTLENMWIRGTNPDVVTYTTVVGCLCDNKQFAEAVELWEEMVRRGLKPDIVACGVLIFGLCKSDKVDEAFELALRMLSLNLELNVCIYNALISGFLRSGSINKAFKIISVMRTNGCEPDVVTYNIRLNHYCNTGMIKEAEKLIEEMEMSGIVNPDRYSYNQMLKGLCKAHQLDRAFGFVSDHMEVGGFCDIVSCNILIDAFCKAKKVSSALKLFKEMGYKGIQADAVTYGTLINGLYGVGYYYLAEEIFEQMLKARVVPNVNLYNIMLHNLCKAGQFEQAQKIFLQMIQKEVSPDIITFNTLIYWLGKCSRAIEAIDLFRDMTARGIEPDSLTFRYLISGLLEEGKATQAYEVWEYMLENGIILDRDVSDRLISMFKSNNK

SEQ ID NO: 2700 - protein, 352 aa, Zea mays
MGGLTMDQAFVQAPEHRPKPIVTEATGIPLIDLSPLAASGGAVDALAAEVGAASRDWGFFVVVGHGVPAETVARATEAQRAFFALPAERKAAVRRNEAEPLGYYESEHTKNVRDWKEVYDLVPREPPPPAAVADGELVFDNKWPQDLPGFSFRREALEEYAKAMEELAFKLLELIARSLKLRPDRLHGFFKDQTTFIRLNHYPPCPSPDLALGVGRHKDAGALTILYQDDVGGLDVRRRSDGEWVRVRPVPDSFIINVGDLIQVWSNDRYESAEHRVSVNSARERFSMPYFFNPATYTMVEPVEELVSKDDPPRYDAYNWGDFFSTRKNSNFKKLNVENIQIAHFKKSLVLA

SEQ ID NO: 2701 - protein, 577 aa, Zea mays
MEGGGWAVGGHALGAAQEPRGQQQHREEEKAAGAAAERKGAGAGGGGGMKFRVRARAPHGVGALLLIGGAAVVGAAVLAWRRSRHGNKGGSVDQPDRRLPAYISHLFRAALKFVNFYKNEYKMGCIVSWALELKRTACLGSILCRKVEGLDGGIVEDGKVQGGSLVQKLSQSNEILSVGNTDIGSGRLDGNASEESHQIHKDGEITADQSESKHDGKIDENSGINPAEVQMHDQESKHEEKNDENSGSNPVEVHKHDLDKEHVEEVDQKSSSNHVEISAHDMCEDNEHVEKIDHVERIDQNSSRDPVKAIMQEMIKVCLVSGSVEKVEEEDSSKKDLEKEIAPKDNKDMEASDGSKLGVNGPGIILSKHNDECGGGAQEAESMENTPTAQLMMHQDQLLDDMVTDTVTETGGAVADTEEDDTVAETEDVVTDTEDTVTDTEDALAETEAEKGERAIADKGELEQDEKKDLVALPELASSPALSSLVKPTVVKKELDFPRPNETGMKTEQDYTNGELREHNDLVSKVQGEGGVATTMESRSSALMIILALIFALATGITIVVRLYSPSRATKLQMDLP

SEQ ID NO: 2702 - protein, 372 aa, Zea mays
MRSPRGGGGLEHVDLIPGIPDDVAVDCLARVPHASHRAMRRVCRGWRSAAAAPAFASARAAAGANEDLVYLMQFGNPSADDGPKDGDEGPGNAPAYGVAVYNVTTGEWRRELGAPPVVPVFAQCAAVGTRLAVLGGWDPLTFEPVADVHVLDAATGRWRRGAPMRSARSFFACAEAGGRIYVAGGHDKHKNALKTAEAYDAEADAWDPLPDMSEERDECDGMATVAGDRFLAVSGYRTARQGGFERDAEWFDPAARAWRRLERVRAPPSAAHVVVRGRVWCIEGNAVMEWMGTRRGWREVGPYPPGLKAGTARAVCVGGGEKVVVTGALDGVGGCGGRHALWVFDVTSKSWTVVPPPPEFAGFVFSVASVRI

SEQ ID NO: 2703 - protein, 503 aa, Zea mays
MLMSHSQQMANSRKPPGLRLLGGAGSLTTYQTLVLVLTFLAYTCFHMTRKIPSIVKSALDPQTKVGFSHWGRLHASRNALTTGWLPFNTADGSALLGEIDVAFLAAYSAGMFFAGHIGDRMDLRVFLTVGMAGTAVFTTLFGAGYWLNVHSFYYFLVIQMVSGLFQSVGWPSVVAVVGNWFGKSKRGLIMGIWNAHTSVGNIAGSLLAAFLLKFGWGWSFAVPSLIMALVGLMVYVFLPVSPEAMEIDSDGGELNCEKDAVKEPLLEPGQEVKHSAVGFLEAWRIPGVAPFALCLFFSKLVAYTFLYWLPFYISHTRIGGEYLSDATAGSLSTIFDVGGVLGGVLAGHISDRLNARAITAASFTYCAIPALFLYRTYGSMSMAWNVSLMFVTGMFVNGPYALITTAVSADLGTHSSLNGNSRALATVTAIIDGTGSVGAAIGPLVTGYVSSRSWSAVFTMLMAAALLAGLLLSKLVCAELQGKTHSSVSKDAGGEHGAYSDEV

SEQ ID NO: 2704 - protein, 478 aa, Zea mays
MAEETVQELRASFASGRTRRAEWRAEQLKGLIRMIDEKEAEISAALHEDLAKPHMESYLHEISITRSSCKFALDGLKSWMKPEKIPAALTTFPSSAQIVPEPLGVVLIISAWNYPFILSIDPVIGAIAAGNAVVLKPSEIAPATSSLLAKLLPEYVDNSCIKVVEGGVAETTSLLEQRWDKIFYTGNGTVGRIVMAAAAKHLTPVALELGGKSPVVVDSNVDLHVAVKRIVVGKWGCNNGQACIAPDYIITTKSFAPELVASLKRVLERFYGEDPLQSADLSRIVNSKHFRRLTELIEEKSVADKIVYGGEVDEKQLKIAPTLLLDVPQDSAIMTGEIFGPLLPIVTVEKIEESFDLINARPKPLAAYLFTKNKKLQEEFVADVPAGGMLVNDTVLHLANPYMPFGGVGDSGMGCYHGKFGFDCFSHKKGVLVRGFGGEANARYPPYTTEKQKILRGLINGSFIALILALLGFPREKR

SEQ ID NO: 2705 - protein, 73 aa, Zea mays
MIEVVLNDRLGKKVRVKCNEDDTIGDLKKLVAAQTGTRPEKIRIQKWYNIYKDHITLKDYEIHDGMGLELYYN

SEQ ID NO: 2706 - protein, 452 aa, Zea mays
MATVSLTPQAVFSTESGGALASATILRFPPNFVRQLSTKARRNCSNIGVAQIVAAAWSDCPAARPHLGGGGGGERLGRRIATDAITTPVVNTSAYWFNNSQELIDFKEGRHASFEYGRYGNPTTEALEKKMSALEKAESTVFVASGMYAAVAMLSALVPAGGHIVTTTDCYRKTRIYMETELPKRGISMTVIRPADMDALQNALDNNNVSLFFTETPTNPFLRCIDIEHVSNMCHSKGALLCIDSTFASPINQKALTLGADLVIHSATKYIAGHNDVIGGCVSGRDELVSKVRIYHHVVGGVLNPNAAYLILRGMKTLHLRVQCQNNTALRMAQFLEEHLKIARVYYPGLPSHPEHHIAKSQMTGFGGVVSFEVAGDFDATRKFIDSVKIPYHAPSFGGCESIIDQPAIMSYWDSKEQRDIYGIKDNLIRFSIGVEDFEDLKNDLVQALEKI

SEQ ID NO: 2707 - protein, 121 aa, Zea mays
MAQGRGSATRGLALGSLLAAAFLLLLGVADAATHRVDWSFNADSWSKGKSFRAGDVLEFNYDPSVHNVVAVDAGGYNGCRPSGTSYGSGSDRITLGPGTSYFICSLNGHCGMGMKMVVNAS

SEQ ID NO: 2708 - protein, 544 aa, Zea mays
MATLPLLLHLLWEASPWARAGAATAAVVLVWLAAWTLEWAWWTPRRLDRALRAQGLKGTRYRLLTGDVRENARLNREARTKPLPLGSHDIIPRVLPMFHNAVKENGTNSFTWFGPIPRVIIPDPELMREVLSNKFGHFGKPLFSRVGKLLANGLANHEGEKWAKHRRILNPAFHHEKIKRMLPVFATCCADMINRWENSMSSKEPSEMDVWPEFQNLTGDVISRTAFGSNYQEGRNIFQLQGEQAERLIQSFQTIFIPGYWLLPTKNNRRMKEIDREIRKILHGIIRKRERAFIDSEGTNDDLLGLLVESNMRESNGNAKLGMTTEDIIEECKLFYFAGMETTSVLLTWTLILLSMHPEWQEQAREEVLNHFGMGTPDFDNLNRLKIVTMILYEVLRLYPPVVFLSRRTYKEMELGGIKYPSGVSLLLPIIFIHHDPNIWGKDASEFNPQRFEDGISNATKHQAAFFPFGWGPRICIGQNFALLEAKMALSTILQRFSFELSSSYTHAPYTVITLHPQHGAQIRFKFSFDMNNENQVCMNGVGV

SEQ ID NO: 2709 - protein, 189 aa, Zea mays
MYSSSCHVMSEKPNGSKAVTLLLRLSTLVLSLISAVVMATATSDCTIYGHGGAAKVTIMFKNYRPFVFLVVLNIAAAVLEAAAIYLQVVKGDDGDEAPKLPRIILVVLDVVVLALVNAATGAVVAAVIAYGPEIDACTVAGGGRFREQVRRSELLSIAASISAVSAAVAKDVPLPFSVWPLSSESGDYY

SEQ ID NO: 2710 - protein, 76 aa, Zea mays
CLIPQENPDLWKWLTSQEQPPEDLISNPVFSAIKSKVTDNLIKHASPETRSTPGQPWVRGWDDIKKGKDGPNYGNQ

SEQ ID NO: 2711 - protein, 520 aa, Zea mays
MDHHRTPMENSASSKPPTPASTPNSRLASAPSPRHSATPPHASAPASAPAPASRTVYSDRFIPSRAGSNLALFDLGPSPSPAAAAASSSSSHEAGPAASSGSAPAAASPYCALLRAALFGPDTPDRVASSAAACSSSSSSPGLSPVGTPATGNIFRFKTEVRRNAKRALFSGGEEEEDALFPGIFTTRGAGPRKVPRSPYKVLDAPALQDDFYLNLVDWSSHNVLAVGLGNCVYLWNACSSKVTKLCDLGVDDNVCSVGWAQRGTHLAVGTNQGKVQIWDATRCKRIRTMESHRMRVGALAWSSSLLSSGSRDKSILHHDIRAQEDHVSKLTGHKSEVCGLKWSYDNRQLASGGNDNRLFVWNPHSVQPVLKYTEHTAAVKAIAWSPHLHGLLASGGGTADRCIRFWNTTTNAHLSCVDTGSQVCNLAWSKNVNELVSTHGYSQNQIIVWRYPTMSKLATLTGHTYRVLYLAISPDGQTIVTGAGDETLRFWNVFPSPKSQSSDSLSCVGGTSFVRSYIR

SEQ ID NO: 2712 - protein, 604 aa, Zea mays
MAATVRRAASSVLSRFLLTKPSPSPASAAGNKSALLGAGAAALHRFSTAPASAAAAAEEPIQPAVEVKHTQLLINGNFVDAASGKTFPTLDPRTGEVIARVAEGDSEDIDRAVAAARRAFDEGPWPRMTAYERCRVLLRFADLIERHAEEVAALETWDNGKTLAQAAGAEVPMVARCVRYYAGWADKIHGLVAPADGAHHVQVLHEPVGVAGQIIPWNFPLLMFAWKVGPALACGNTVVLKTAEQTPLSALYVANLLHEAGLPEGVLNVVSGFGPTAGAALCSHMGVDKLAFTGSTGTGQIVLELAARSNLKPVTLELGGKSPFIVMDDADVDQAVELAHQAVFFNQGQCCCAGSRTFVHERVYDEFVEKSKARALKRVVGDPFRDGVEQGPQVRIRTLISQRRPAHPLRFQPSPALRSSPCAALSDRRRAIQQDLAVRPVRRRQRCHPRRRRRQGRRQGLLHTADGVCRRQGRNEDRSGGDIRAGANHSQVQRRGGGDPARERDALRAGGGGVHAEPGRGQHPVAGAAGGHRVGELLRRVRRHHPVRRLQDERRRAGEGHLRPPQLPPDKGRRHTHQEPRMAVNHILRPCPHGAAPVLGERDE

SEQ ID NO: 2713 - protein, 339 aa, Zea mays
MLFWKDGGGTGGGNGRDLSGGPPCGQVRVLVVGDSGVGKSSLVHLLLKDSAVARPAQTIGCAVGVKHITYSSPGSSSNSVKGDAERNFFVELWDVSGHERYKECRSLFYSQINGVIFVYDLSQRKTKTNLNKWAVEVSESGTFSAPLGSGGPGGLPVPYLVIANKVDIAPRDGRRVSSGNLVDVARQWVEKQGLLPSSEVLPLADNFPGNSGLLTAAKEARYDKEALIKFFRMLIRRRYFSNELPAPSPWSLTPREDTILPVETVNDDDMFQRKSYGGQSYKYNGVTPLPAQRNLTPPPTLYPQQPMSSSSENYRYHRFSSSSIPDSSGGSKSRANLNI

SEQ ID NO: 2714 - protein, 100 aa, Zea mays
MGRRKEHLERVRVEAYCWDVFKPVEMVEIDSMEKLDDAFRMASWCQKCIYLMPRMEKIAGQYPGLLRPYSCPSLLFILLSGSICAAQNLALCFILEYSCF

SEQ ID NO: 2715 - protein, 264 aa, Zea mays
MAMEPNMARRLWRVVRAVLFMLRKGMPKRKLAMDLHLLIHRGKIAGKALGNLMTAHGHNSDKAAAAEAAPPPQHFSCGRRGHDPSLAVYDPRGTREVEFSCSNTPSYPSLHLVPTGKRRRRNNNNNNSSRRRGTHRGANGAEPGWYNYDASDIARAFEILNNNEQLLSGGDGNSSDQPSPLALVATPSPALWASFGRTPAHARQLRITDSPFPLGDDDGDCGQVDLDAEDFIKKFYDQLRTQQALATATPDYCGGYARPVSGIA

SEQ ID NO: 2716 - protein, 292 aa, Zea mays
MEGKEEDVRLGANKFSERQPIGTAAQGAGAGDDDKDYKEPPPAPLFEPGELKSWSFYRAGIAEFVATFLFLYITVLTVMGVSKSTSKCATVGIQGIAWSFGGMIFALVYCTAGISGGHINPAVTFGLFLARKLSLTRAIFYIIMQCLGAICGAGVVKGFQQGLYMGNGGGANVVAPGYTKGDGLGAEIVGTFILVYTVFSATDAKRNARDSHVPILAPLPIGFAVFLVHLATIPITGTGINPARSLGAAIIYNRDHAWSDHWIFWVGPFIGAALAAIYHQVIIRAIPFKSRS

SEQ ID NO: 2717 - protein, 124 aa, Zea mays
MGHLFLLLVALLLLTSTRAAAAVHAKASVIEEASFAGIRGVIGSRPPTCEGRCRSCGHCEAVQVPVSPQQLQRRKKEGLGLGSSRAAAAAAGGRARAMPASYYDHSNYKPLSWRCKCGRHILDP

SEQ ID NO: 2718 - protein, 725 aa, Zea mays
MDLTSFITSVLTSFVIFVALVLLFTWLSRRPGNAPVYYPNLLLRGLDPWAGRGRGTRSPVGWLRDAISASEPDVVAAGGVDAAVYLVFLSSVLSILVYSGIVLLPVLLPVAATGGALSTIPIPTNKSAQSAQNFSSIERLGMGNVPEKSMRLWAFLLSVYWVSFVTYFVLWKSYKHVSNLRATARSAPDVKPEEFAVLVRDIPRPSPDETIKDSVDSYFRALHPNTFYRSMVVTDHTKADKIYQEIEGHKQKIARAEVVYANSNTRPTHRTGFLGLIGTKVDTIEYCSEQIKELLPKLEAEQKTTLHEKQQRAAIVVFNSRSAAAFASQTLHAQVYDKWTVMEAPEPRQIIWSNLPRKLYDRQIRQCVVYGIVFLIVVFYIVPLTAIAAVTTLENLEAKLPFLKPVVEQPAIKTVLEAYLPQIALIVFLALLPTLLMFLSKQEGIPSQGHAVRAASGKYFYFIVFNVFLCYTLGSTLFKSLTTIINHPAEIVNMLAKSLPGSATFFLTFVALKFLVGYGLELSRLVPLIIFHLKRKYLCKTEEEVRAAWAPVDLGYNTRIPNDMLIATVVLCYSVIAPLIIPFGVAYFALGWLIARNQILRVYVPSYESYGRMWPHMHTRIIAALMVYQTTMIGFISLKKFAYASVLVPLLPASIIFAYVCHMRFYPAFAKTPLEVVVRHDLKETPNMEAIYTAYIPPCLKPDKLEDLDAFEDAQSRATSRVPSI

SEQ ID NO: 2719 - protein, 367 aa, Zea mays
MTKQGMVVPVPEAAVAVPPNSAPLFQYPPPRAAPGVAVRKKCLQMGAGAGRIGGWVESMRASSPTHAKAAAALAAGVEEERYAAWMVKHPSALAMFDQLVAASKGKQIVVFLDYDGTLSPIVDDPDAAYMSDTMRRAVRSVAKHFPTAIVSGRCRDKVFEFVKLAELYYAGSHGMDIKGPAKGSRHTKAKGGGVLFQPASQFLPMIEQVHDSLVEKTKCIPGAKVENNKFCVSVHFRCVDEKSWITLADMVKSVLKDYPKLKLTQGRMVFEVRPTIKWDKGKALEFLLESLGYADCTDVLPVYIGDDRTDEDAFKVLRKRGQGVGILVSKHPKDTCASYSLQEPAEASIPRVPVSTPPPPPLRLLRR

SEQ ID NO: 2720 - protein, 518 aa, Zea mays
MANSEYEYVKREFEFDRCLPPSNWIVVRIDGCHFHRFSKVHAFEKPNDENALRLMNACATAVLEKFPDIAFAYGVSDEYSFIFREETEFYHRRESKILSLCVSYFTSVYVMKWKDFFPNKELKEPPYFDARAVCYPNLKTIRDYLAWRQVDCHINNQYNTCFWMLVKSGKSEQEAQLALKGTFAKDKNELLAKQFQINYDDELAMFRKGSSVYREKVETTVKIDDYGEPIKRPRLKVTVAHVDTIGTAFWENHPHILREGKFMHGFVKKFGINHIFSPCNWIIVRIIACQFDQFSTIHSFDKPNDETALRLMNESASLMMEQYPDIVFGYGFSNEYSFVFHEKSELYQRRESLILSSCSSYFTSLYMTKWKEFFPYTELMQTPHFEADALCYPKLKIICEYLSWRQAECHAGNQYNTCFWMLVKSGKSEKEAHEILKGTLSKDKNELLFQQFQMNYNNEPAMFRKGSCVYRRKVEELAGAEDGGNGTSRERWHVKVDHVDLGPGFWRKHPWLMTNCTQ

SEQ ID NO: 2721 - protein, 485 aa, Zea mays
MGQRQSHSKRDGSSHGRRSRSFQQQPSAQWGAGGGGYYQQDPSTGYYGAPVPQQGGGYYQQDPGTGYYGAPVPQQGGGYAAPYRDKPAAAAAVAAPAPQAAKPRQLDRRYSRIADEYHSVDQVTDALAQAGLESSNLIVGIDFTKSNEWTGKFSFHGRSLHHISNTPNPYEQAISIIGRTLSKFDEDNLIPCFGFGDASTHDQDVFCFSPDEKPCNGFEEALDRYRELVPHLRLAGPTSFAPIIEMAMTIVEQSGGQYHVLLIIADGQVTRSVDTASGQLSSQEQKTVDAIVKASELPLSIVLVGVGDGPWDMMKEFDDNIPARAFDNFQFVNFSEIMSKNMAQSRKEAAFALSALMEIPPQYKATVELGILGRRSFKSPDRVPLPPPSGSHGAYSYYSSKGFSKPSTYPQSSSSSSPYPHYETPHTATPAAPSATYDNQVCPICLVNPKDMAFGCGHQTCCDCGQILESCPICRTPITTRIKLY

SEQ ID NO: 2722 - protein, 810 aa, Zea mays
MATLEDLGVSAFINILGAFVFLLLFAVLRIQPVNDRVYFPKLYLAHKRHQHDHAARSAFRRFVNLNLCTYVTFLSWVPGALRMSEPDLVAHAGLDSAVYLRIYTLGLKIFLPITTLALLVLIPVNVSGGTLLDLRKEVVFSDIDKLSISNVSPGSNRFFIHLLMAYVFTFWVCFMLYKEYSNVAFMRLHFLASQKRCADHFTVIVRNIPRVSSHSTSETVDEFFRRNHPDHYLGHQPVYNANRYAKLVKQKERLQNWLDYYELKFERHPERRPTRRTGCLGFCGREVDQIDYYRARISELERRMTSERQKILNDPKAVMPVSFVTFDSRWGAAVCAQTQQSKNPTQWLTDWAPEPRDVYWQNLAIPFFSLSIRRFLMSVAVFALVFFYMIPIAFVQSLANLEGLEKVAPFLKPVIEAHVVKSFLQGFLPGLALKIFLYILPTVLLIMSKVEGYVSLSSLERRTASKYYYFMLVNVFLGSIIAGTAFEQLYSFLHQPPTQIPRTIGVAIPMKATFFMTYVMVDGWAGIANEILRVKALVIYHLKNMFIVKTERDRDRAMDPGSIGLGENLPSLQLYFLLGLVYAVVTPLLLPFIIVFFAFAFLVYRHQIINVYNQEYESAAAFWPQVHSRIIASLLISHVTLFGLMSTKEAAYSTPLLIFLPLLTIWFHKYCKSRFEPAFRKYPLEEAMAKDTMEHASEPNLNLESFLANAYLHPIFRLFEEAGKEEETVEVRIDKAEKQQHRHEEDEAHARSSSQYREEETHFRSTHETHYHHEESHVSRSTQYHEGIHVRSDTDSPSPPHFVYHYDIQQ

SEQ ID NO: 2723 - protein, 230 aa, Zea mays
MLTGHVIAETSSACKYSICWRILFISSAIGFLLTIGLFWARDTIDSKYRPVQYCCTAWFRGTEMGKQKIVLKLPLDDERKRRKAFKAAVGMNGVTSATMEGDKITVVGDGVDPITLTTILRRSLGYAELLSVSSGDDKKKGDGYGYGSAGGMMYGGGGYGGGKEGKESKESSGGKSSGGGGGYGGHYQAMPSVSYPAAYQQYNAMPPYPAAYSYPAAYPQQEQDPGCSIM

SEQ ID NO: 2724 - protein, 509 aa, Zea mays
MSAPMEISFSAPPPPPDAASTAAASPLLEPAAAQMLPPVAAVSSSQPMQQTAAAAAVVAPSPADDKVLVSVEVLLHATSVARHEDVQVAVERMLEARSLSYVDGPVPIPADNSFLLENVKRIRISDTDEWVENHKVLLFWQVKPVVHVFQLSEDGPGEEPSEDDTLSSFNEWALPAKEFDGLWESLLYEVGLKQRLLRYAASALLFTERGVDTCLVSWNRIVLLHGPPGTGKTSLCKALAQKLSIRFKSRSMLNEICFFTRCVILQSSLTLVYTRYSMCQLIEVNAHSLFSKWFSESGKLVAKLFQKIQEMVEEESNLVFVLIDEVESLAAARQAAISGSEPSDSIRVVNALLTQMDKLKSWPNVIILTTSNITTAIDIAFVDRADIKAYVGPPTLQARYEILRSCIQELLRVGILTYPQGSSVPCILNYSTLNEKKHCPEAAEPHGALHLSNLLYEASKLCEGLSGRSLRKLPFLAHASVTNPSCCDASTFLHTLIQTARREVLESRG

SEQ ID NO: 2725 - protein, 473 aa, Zea mays
MTAVATPTPPPPRQLSLEDLKAISVLGRGAKGVVFHVVHAHGEPDGEGEGGAAAAAMALKAVSREAARHKKAGSGDGDGHRRIWFERDVLLSLRHPLLPSLRGILATEAVVGFAIDRCGGGDLNSLRRRQTEKMFSDSVIRFFAAELVLALEYLHSLGIVYRDLKPENVLIQDSGHIMLVDFDLSTRLPAPPQEPDAPVTSPNAKPALPVAAPSPSRGSARKPAGAALCFPFRTAIATKPAARPRTRGRRCPPRARPPPPRRRRPRRRPRPPPRHPPAGGLPRSRTRSWGRRTTWRRRSSPGAATTSRWTGGAWAWCSTRCSTAARRSGGRAARRPSTASSPSSRSSSASRRRCATSSPASSRRTPRSASARAASGPTLSSAASTGTASCRWRARRSSRRRRRRTRARTATATRRLTSRRSSARCSRPTTRRAGRLGLWRTEAVSAATAIATGGEINLKMAISPCSSELFIFF

SEQ ID NO: 2726 - protein, 403 aa, Zea mays
MESGGGGDDQLHGLKFGKKIYFEDAAGSSSGSSSGGGSAPAPPATQQPSPPAASPRAPAGGGRRGRAAAGGAGPSTAPAPARCQVDGCNVDLTDVKPAYYCRHKVCKMHSKEPRVLVNGLEQRFCQQCSRFHQLPEFDQLKKSCRKRLAGHNERRRRPPPGPLASRYGRHAASLGEEPGRLRSFMLDFSYPRVSSAMRGGFPAVRPGGERVPGGIQWQAGLDPRHHQGAVAGYGAHYGSEGGSSSSARPPVFPGPELPPGGCLAGVPADSSCALSLLSTQPWDAAHSHSHSHAAPTAGFDGGSPVAPSLMAASSYIAPSPWTETDSWGHEGGRSVPQLPPDDVPLGEVHSGSSSHHGQFSGELELALQGNRPAPGSAAPPAPRNNQGSAGTFDQAGNTMDWSL

SEQ ID NO: 2727 - protein, 360 aa, Zea mays
MTKHGVVIGPEDVAAARHFSFPPPRTAAGGESCRKLAAQVDLGPAVVGSWLDSMKASSPRHRLMAPVPGAADAEHDDWMERHPSALDRFDALAAAAKGKQVAVFLDYDGTLSPIVEDPDRAVMTDEMRDAVRGVAARFPTAIVSGRCRDKVFNFVKLAELYYAGSHGMDIKGPTAQSKHTKAKVSSYQAGAVLCQPARAFLPVIEEVYRALTASTAPIPGATVENNKFCLSVHFRCVQEEKWRALEEQVRSVLKEYPDLRLTKGRKVLEIRPSIKWDKGNAMQFLLESLGFADSNNVFPIYIGDDSTDEDAFKVLRNMGQGIGILVSKIPKETSASYSLREPSEVKEFLHKLVRSKQRRD

SEQ ID NO: 2728 - protein, 632 aa, Zea mays
MPPPRLLPPIIVLLLLAPPAAPQPAPGSEAAPQQDGLRCLRGVKHDLADPNGRLADWDFKNTSGGAVCSYSGIGCWNLQESRVLSLSLSGFGLVGSIPSSLQYCSAATTLDLSSNALVGTILPALCDWLPFLVTLDLSSNQLTGAIPAELANCRFLNSLTLSGNQLSGQIPASLARLDRLKSLDLSGNQLSGQIPPQLGDRFPRDSFSGNSGLCGRPVSSRCGRGLGSAGLGIVIAAGVLGAAASLLLAYFFWRCSGKGKGGRRRHRRGGSESGGGEDGSWWTERLRAAHNRLAPVSLFQKPIVKVKLADLMAATQDFSSSHIVVAGSSRAGTAYRAVLRDGSALTVKRLHSCPLSEKAFRAEMCRIGQLRHPNIVPLLGFCVVEDERLLVYKHMESGALSSVMKKKPGEEAPLLDWATRLRIAVGAARGLAWLHHGFQVPQIHQNLSSSAVLLDEDYEARITDVGLTRLVRMAPGEGGDTSPFLKGDLGEFGYVAPECASNPVGTTKGDAYAFGVVLFELVSGQEAAAAAVGTVDVMGEGFKGTLVDWVYQLKASGRIGDAVDKSLRGKGHEAEIEEFLKVAFACTQPRVRERHSMYRVYHALKSIGEGRDATEQFDEFPLAYNKDDSDTM

SEQ ID NO: 2729 - protein, 56 aa, Zea mays
MLAASSSHTSEVFFLPHPDLGLPDEQKRSEESICAAKVLACAKARGRREDETKSEH

SEQ ID NO: 2730 - protein, 98 aa, Zea mays
MNHDLSSATSTPRQSVVASEGRTSTPRSMTPSRVTSVPQPSHPSLMLFSFISSLFRCFSSEVEAEVFLLPLAFSSFLPLRPCGYVAHQTQSQSPSRFP

SEQ ID NO: 2731 - protein, 917 aa, Zea mays
MRRHTPGLLAANLLRASSLLRPPSVLAARAALLHHAPDDAHRLLDETPRGRAAAIVRALTSAPSSSSGDTACIACLHCAALKSGAVLDPPVRTSLLAAYARAGRGAGAGAGAGAALALFREAVAPDVILWNAAVGALTTSCRYDDAAALFRRMARELGEFDSTTVVVMLSGASRAGNLRRGMELHGMAAKSCLGAHCLGAWNALVDMYAKCGEFRSAEVVFHSMPCRDTTSWNSVISGSIFNGLAEVSACYFREMSCSIFQPDEVSLSSVLSACSRLDDLFSFGESVHSCAVKLGYEDTASCSVANSLVTFYSEFGMPEAAKKVFASNLNRNLVSWNAMIKGLVQNERVTEALAVLRQMRLENQPDVATLVTIVSGCADQGLLSEGETLHGYVIRKGLLREEPSMGNSLLDLYLKCDEPSNAGLLFMTMPRRDLISWNTMISGYSRYGPLREEAQLMFKGLLSEGSSCSLATMLAVIPSCSIPEELSFGKALHSFSLKCGFTSSGVSAVNALIHMYMSCGDPLAAFSLIERIIPVSDIISWNTVIVGCLQNELHKDALEIFRFMYCSLAINPDSITIVSVLSACGDLNLLALGKSIHCMILKHLFASNLRVKNSLLTMYFRFGDTRSAELVFYSMGDTNLCSWNCMISGFAQNNKGWRALQFYQKMEDFEPNEISVVGIICACTQLGGYRQGKSIHGHVFRSVLHNNVFISASLVDMYCKCGRLDIAVRVFEASAEKSIAGWNSLISAFGFHGHGMKSIDLFWKMHDSGMKATKSTFIALLSACSHSGLVDEGWKYYCLMSEKFGITPAPEHHVCIVDMLGRAGRLQEAHKFVESLPSQQTHGIWGALLNACSSRSELKMGESIAKHLLHLEPGNSGYYVTAANLYAYKDMWSGVAQVRSVLQDKGLVKPHGRSTVG

SEQ ID NO: 2732 - protein, 156 aa, Zea mays
MYSFLSDPSFLSTRCGHCDAWTWLRPLPSWTHVISKCPYPPPDPTTACRPIRVLPRARMAFRHARYFSVACTGRQCSGQNEVRSVTLGPASRSRPAPGPNKAVPGRCSCARSAVATPMPRIFHWASAPSDGIRTAAAAPRSAIKTLRGTHSLSVLS

SEQ ID NO: 2733 - protein, 539 aa, Zea mays
MGNCCVTPKAADDAGGGKKPKEPKQKKGKKPNPFSIEYNRSGQASAPKLVVLRDPTGRDIAARYELGAELGRGEFGVTYLCTDRASGEALACKSISKKKLRTAVDLEDVRREVEIMRHLPKHPNVVTLRDTYEDDNAVHLVMELCEGGELFDRIVARGHYTERAAALVLRTIVEVVQMCHKHGVMHRDLKPENFLFANKKESAALKAIDFGLSVFFTPGERFSEIVGSPYYMAPEVLKRNYGPEVDVWSAGVILYILLCGVPPFWAETEQGVAQAIIRSVIDFKRDPWPRVSDNAKDLVRGMLNPDPKRRLTAHQVLGHPWLQNIKKAPNVNLGETVKARLQQFSVMNKFKKHALRVIAEHLSVEEAADIKDMFEKMDLNKDQMLSFEELKLGLHKFGHQMPDADVQTLMEAADADGNGSLNYGEFVTLFVHLRKIGNDEHLHKAFAYFDRNQSGYIEIDELRESLADDLGQNREEIINAIIRDVDTDKDGKISYDEFATMMKAGTDWRKASRQYSRERFTSLSLKLQKDGSLQMTSTR

SEQ ID NO: 2734 - protein, 459 aa, Zea mays
MMEAEKNGNILMQKYEVGKLLGQGTFAKVYHARNIETSQSVAIKVIDKDKIFKVGLMEQIKREISVMKLVRHPNIVQLYEVMATKSKIYFVLEYVKGGELFNKIAKGKLREDASRKYFQQLVSAVDFCHSRGVYHRDLKPENLLVDENGNLKISDFGLSALAESRRQDGLLHTTCGTPAYVAPEVISRKGYDGAKVDTWSCGVILFVLMAGYLPFQDSNLMEMYRKIGKADFKCPPWFPSDVRKLVSRILDPNPRTRMPITKIVECFWFKKGIDNKLIRKNIEMKGKVSALTDVNVVFSSTGIGSNNNKLVDVEQDVAKITNLNAFDIISLSEGFNLSGLFEESEKRKEARFTSSQSASTIISKLEDAATCSKMTIKKKEGGVLKMEGANEGRKGVLSIDAEIFEVTPAFHLVEIKKNNGDTLEYENLFKQDMKPALKDIVWAWQGESKDQQAKDHNQS

SEQ ID NO: 2735 - protein, 458 aa, Zea mays
MLDINLFRTDKGGNPELIRESQRSRFASVELVDEVIALDKAWRERQFELDKIRQELNATSKKIGKLKASKQEEEAKKLMESTDEIKKRLAAKEVEVQEAKSTLDAKLTTIGNIVHESVPVSEDEANNKIVRTFGEKRVEENLKNHVDLCRMLDIVALEKGADVAGGRGFYLKDEGVLLNLALINFGLAFLRKRGFKPMQTPFFMRKETMAKCAQLAQFDEELYKVTGDGEDKYLIATSEQPLCAYHLGDRIYPAELPIKYAGYSTCFRKEAGSHGRDTAGIFRVHQFEKIEQFCITSPNDNDSWEMHEEMLKNSEDYYKEIGLPYQVVSIVSGALNDAAAKKYDLEAWFPASKTFRELVSCSNCTDFQSRRLGIGYGQKKNDEQSKQFVHMLNSTLTATERTLCCILENFQKEDGVEVPKALQPYMGGIEFLPFKQPLDVKQASDSKSNKSKSKGNAA

SEQ ID NO: 2736 - protein, 268 aa, Zea mays
MPPEPDRGRRRRRRGGPAAQGRGLPGGRAGVREGLPRRQPRRRGGPCARARPPPQHGLVPVHRGDRRGVGRLRGARGRRAGQRPVRHPHGGGPGARGAVRQRRRRKGRAAPARGRRRRLRPKAGVDDGGEGRGRARRRGARAGGAPGRVGRVPEGVPEGRARRGERGAAAGPGRARRGQTVPRVGAAGRGAVPAVPQADGGRRRVRVPAGPGRRRGGRSQAARRVARQGEDAGRVPADVTPPWSVPLPLECCLYSAVCINVCCCCCYS

SEQ ID NO: 2737 - protein, 124 aa, Zea mays
MAGIEAELEGDVAGAYRPSWGFTASSEGAETRANWRLGGQALGIGSAEQGGRSFGEMGRAEEVPRRIRAREKLGAAARRSMGRKMSRDGRAQAPRSHGRESEPEGAAHSSRRGTKRDHGSEPGA

SEQ ID NO: 2738 - protein, 124 aa, Zea mays
MAGIEAELEGDVARAYRPSWGFTASSEGAETRANWRLGGQALGIGSAEQGGRSFGEMGRAEEVPRRIRAREKLGAATRRSMGRKMSRDGRAQAPRRHGRESEPEGAAHSSRRGTKRDHGSEPGA

SEQ ID NO: 2739 - protein, 1039 aa, Zea mays
MVMDRAGWLWRRKSSDKSPGGSDSSLSVSSHSEQCSDDQGQYQSPEAFSRSKYDYSQETGVARSLNGKLAAGVNMNNFNPEHGQSFEQHISSNVGDEEIKETLESLNYKLSAALSTIRAKEDLVKQHAKVTEEAVAGWEQAEAEVTTLKGLLEASCRKNASLQDQVSHMDEALKECVRQLRLAREEQEDKVREVVSNSLVPQSENPELQNHIAELKKRLEMTRLEASSSMILQHDLHERLRAIERENLDLKAKHQAIEKENIDLKAKLLVQSKDLKILMLERDLSNQVAETASKQHLESVKKIARVEAECRRLQHLTRKTTLINNSRSTQNNCCMESLTDSQSDHGEHMVGVDNDLQNSDSWALALIAELDQFKNGKDGSRNIVNNPVEIDIMDDFLEMERLAALPESDGTSSNFEMETDSDKAVTRNSSLKVKNEELQNKVANLQEKFEAIACEKRELELALVEVRDQLEISCDALVVAKNRLVEMQMQLDSANDSKLSALDDVERLDSERKALELQLESKSVEVEELLIAVASLEENAEQKELESQLELMSAQATELRLTVASLEERIQAERDLSVQQKQNAEAMLNAKEELEAQLCSANTEMGKLRDIIKALENEVKKERALCEELTAQLQIKVEAAVNAVKESLEAQLCSANTEAGKLRDVVKALQDEVEKEKALREELAANLEVKTRAARTAEVVKESLEAQLSSAHAEMHKLEEITKQLQNEVEKEKEFSAQLEMKIEVERARSIESAKESLEEQLLLVNSEAAKLHDMVSALEHDVEKEKFFSAELQMQLEALEVVKKVLESEAESAHQDAKILKQKVESLEAKLEEQMSSADEFTETLQSERMVIEHKLKTADGEILKLTNKVSLLHREIEQERLLSEEYEQKCQKLEAQMSRDSRDAKLWRLANSNGDLKVKKEKELANAAGKLAECQKTIASLDRQIKSLTDLDSVVLEPERLESSRDMPLPLDFRNGDAEFAMFADDLYDFDLPNNDTSFFSPPPSSIQPSSPPSEMSVFAGGLSTLSSYRSKRAIRR

SEQ ID NO: 2740 - protein, 688 aa, Zea mays
MRIVVWFRRDLRVEDNPALAAAARAGGEVVPAYVWSPEEEGPYYPGRVSRWWISQSLNHLDASLRRLGAGKLVTRRSADAAVALLQLVRDTGATHVYFNHLYDPISLVRDRRLKEMLAAEGIVVQSFNSDLLYEPWEVVDDEGQPFTMFDPFWNRCLSMPYDPPAPLLPPKRINSGDLSMCPSEDLIFEDESERGSNALLARAWTPGWQNADKALTAFLNGPLADYSVNRKKADSASTSLLSPHLHFGELSVRKVFHLVRMKQLVWSNEGNHAAEESCTLFLRSIGLREYSRYLSFNHPSSHERPLLAHLRFFPWVVDESYFKIWRQGRTGYPLVDAGMRELWATGWLHDRIRVVVASFFVKVLQLPWRWGMKYFWDTLLDADLESDALGWQYITGSLPDGRELDRIDNPQFEGYKFDPHGEYVRRWIPELARLPTEWIHHPWDAPVSVLQAAGIELGSNYPLPIVELDAAKGRLQAALSEMWQLEAASRATMNNGTEEGLGDSSEVLFPQELQMEVDRQPAPAEAAANVHVHVPMPARRRGDQMVPTMTTSSLNRAGTEVSADLVVANSEEEDTRAQVPFHAHLHLHPRAEAPPAARRTNNGARQHDVFQQRRNHRRDALLAPSASEASSSWTGREGAVVPVWSPPAASGHSDAFAADEADVSSRSYLGRHPQSHRLMNWSQLSQSS

SEQ ID NO: 2741 - protein, 610 aa, Zea mays
MGLFSSPAKVYKPAADVDLGPGSDELYISPNVKAPRVAGLLVKIFVWILEMPIVGQIVLYILKKDNLINKLVSDADIPEPPLFTASHSWEDTPEQSVRLTKPDLSAAERVQEAVGCLPARLEAALAADARGIRRWTVRDFSDAYRSGEVTPVQVAARFLAAVRESSGPGVSNMAFFISCDPDDVMRQAEESTLRYQRGAPLSALDGVLVGVKDEIDCLPYPTTGGTRWLGAARRCEADAACVAQLRACGAVLAGKANMHELGAGTSGINPHHGSTRNPYNASTIAGGSSSGSAAIVCAGLCPVALGVDGGGSVRMPAALCGVVGFKPTAGRLSNAGVLPLNWTVGMPGILAGTVEDALIAYSAIVDQSQPSYLRPELNLPQLGSTLSIGNIKLARYGKWFNDSAEDIRSCCDKALQALRANYGWQTVDVTIPEVEEMRLAHYVTIGSECTTSLAKYLDKLKRSEIGWDARVALSVYGSFSSRAYLNAQRLRNRQMYFHKQIFKAADVIVSPMTGVTAYPLQDDALSTGELDYINGAALVRYSIAGNFLGLPAITVTVGYDRGGLPIGLQFIGRPWAEATLLHVAFATQQACAKGYKKPPVFYDLLGKQQD

SEQ ID NO: 2742 - protein, 376 aa, Zea mays
MADEDIQPIVCDNGTGMVKAGFAGDDAPRAVFPSIVGRPRHTGVMVGMGQKDAYVGDEAQAKRGILTLKYPIEHGIVNNWDDMEKIWHHTFYNELRVSPEDHPVLLTEAPLNPKANREKMTQIMFETFECPAMYVAIQAVLSLYASGRTTGIVMDSGDGVSHTVPIYEGYTLPHAILRLDLAGRDLTDHLMKILTERGYSLTTSAEREIVRDIKEKLAYVALDYEQELETARSSSSVEKSYEMPDGQVITIGSERFRCPEVLFQPSLVGMESPGVHEATYNSIMKCDVDIRKDLYGNVVLSGGSTMFPGIADRMSKEITSLAPSSMKVKVIAPPERKYSVWIGGSILASLSTFQQMWISKGEYDETGPGIVHMKCF

SEQ ID NO: 2743 - protein, 240 aa, Zea mays
MEDGSSAPRRATPPTRRSRSADFHNFSERRRRDRINEKLRALQELLPNCTKVTTSTPLRSVAFFSVSHISELMALFQTDKVSMLDEAIDYLKSLQLQLQMLVMGKGGGMAPVVPPELQQYMHYITADPAHQMMPPPLRPSAGQLQPAAGRQFQITQAAAAAANNDNDPQRRRQSNVESDFLSQMQNLHPSDQPPHHHNFLRPPRLQLFTPEQRGGGGGLPTTSHNAGWISGRSSSYNFME

SEQ ID NO: 2744 - protein, 243 aa, Zea mays
MPEHSENAAADLMGNIMETIAENLPRQKSVRFDDGDGSSISEQAKKLFGGGESRKKSVHHVLGGGKSADVLLWRNKKISSSVLGVATLVWVFFEWLDYHFLTILCFMLALGMAVQFAWSIFSSSVPRVQLPEELFASAGAAAGAQVNRALGFLQDVACGRDLKRLVIVIAGFFAAAVVGSFCNLLTVIYIGFVCAHTLPVLYERYQDQVDEFLYNMLGLVQSQYSKLDSKGILKGGVKFRKSD

SEQ ID NO: 2745 - protein, 235 aa, Zea mays
MSSPPPVKLIGFFGSPYAFRAEAALCLKGVPYELILEDLFGSKSELLLHHNPVHKKVPVLLHGDGRAISESLVIAEYVDEAFDGPPLLPADPYARAAARFWADFIETRLTKPFFMAIWVEEREARLRFEEEAKELVALLEAQLEGKRFFAGDRPGYLDVAASALGPWRSVIEELNGVALLSEDDHPNLCRWTRDYCAFEALKPCMPDREKLLAYFTKNFDRYKAAVNATLSQSQQ

SEQ ID NO: 2746 - protein, 459 aa, Zea mays
MPLLPLLPVMASTFSPTSAARALLPGSTSRPLFLAASASSGNRHLTFPSPYSLCFPARSSASAESNTPPYRPPGTLAGRIQPSRKGLDFRRGRFTVCNVAAPTAAEQEATASAAKETQRPVYPFAAIVGQDEMKLCLLLNVIDPKIGGVMIMGDRGTGKSTTVRSLVDLLPDIRVVVGDPFNSDPDDPEVMGPEVRQRVLQGDTGLPVTTAKITMVDLPLGATEDRVCGTIDIEKALTEGVKAFEPGLLAKANRGILYVDEVNLLDDHLVDVLLDSAASGWNTVEREGISISHPARFILIGSGNPEEGELRPQLLDRFGMHAQVGTVRDAELRVKIVEERARFDRDPKTFRESYHDEQEKLQQQISSARSNLGAVQIDHDLRVKISKVCSELNVDGLRGDIVTNRAAKALAALKGRDSVTVEDIATVIPNCLRHRLRKDPLESIDSGLLVIEKFYEVFS

SEQ ID NO: 2747 - protein, 292 aa, Zea mays
MGKDDVVQSGAGGGEFAAKDYTDPPPAPLVDAAELGSWSLYRAVIAEFIATLLFLYVTVATVIGYKHQTDASASGAGADAACGGVGVLGIAWAFGGMIFVLVYCTAGISGGHINPAVTFGLFLARKVSLVRALLYMVAQCLGAVCGVGLVKAFQSAYFDRYGGGANSLASGYSRGAGLGAEIVGTFVLVYTVFSATDPKRNARDSHVPVLAPLPIGFAVFMVHLATIPVTGTGINPARSLGAAVVYNKDKPWDDHWIFWVGPLLGAAIAAFYHQYILRAGAIKALGSFRSNA

SEQ ID NO: 2748 - protein, 418 aa, Zea mays
MCGGAILSGFIPPSGVAAAAAAAKKQQQQQQRCRVTADLLWPGPGSKGAPQDKEEDFEADFREFERGLGEDDVDSAGEGGDPEVQELPPPEPTRFAFATAAKAAVDGVMTPPPKDVQGDRAVKKRGRKNQYRGIRQRPWGKWAAEIRDPNKGVRVWLGTYNTAEEAARAYDAEARKIRGKKAKVNFPDDATGTRHRPTTDEIFNNLKNDDNNNNDDLFAMFAFGDNKKKVPAAKPAAAEGGSGSGSFLVPAPAVAVVPGNKRRSSATNTMLSVSDDQRSNSYGSGSSDLVGSWSWDDDAAAAAMTSDYTSSVFAPDNAVLPAASYTQGGAPKRMRSSYGGAPPSLAHDAAMPGFGLDKVSYHHYQALPPYYVGSSNASVGNLGLLQQADDAPAPQDGASAGDIWSLDELLMLAAAGAY

SEQ ID NO: 2749 - protein, 330 aa, Zea mays
MMSFRSSSHEGFGFGHAAAAASGAPLPWWAGPAPMLSGEPLALSPEAHCRDGRIQAPQGPPVPSVKAPVLAPQQPPPLPERGIPELLNLSVDPQGKGKKGSDHSATIALQSPFAIYNAHFELGLGQSMISADNSYADQHYGLLSPYPVGATPGGRLLIPLNRPTEAPIYVNAKQYDAIMRRRCARAKAERENRLVKGRKPYLHESRHQHALRRPRGSGGRFLNTKKESSGKDAGGGSKAMFSNPLMRQVASPSSEIQQSDLGNPSSVSSLSGSEVSSMYDHEDAGHCHGLDHPFFTRLPSIMDGGEHGVIVGNPFKWAAASEVCCDLLKA

SEQ ID NO: 2750 - protein, 774 aa, Zea mays
MQQQHQGGGGGGGGGSQFGAPPPDMGPFSPTPAATGPMPLSSRPPSAQPQQQPRTSYEELAPMVPGAAAASGFDDETMGSGGGGGGSSGASSNRWPREETQALIRIRSEMDATFRDATLKGPLWEDVSRKLADLGYKRSAKKCKEKFENVHKYYKRTKEGRAGRQDGKSYRFFEELEALHAAAPQPPPQHLPAASTAPQLHALAAPVSPTPQQQLPASSAAPPLHAFPAPVSAPPPLSSMPLLTGPMQPAPISSAAPAPAPVDLLVAHQPLNLQGFSFSSMSDSESDDESEDDDMTAETGGNQDRLGKRKRGDGGGSSSNKMMSFFEGLMQQVVDRQEEMQRRFLETMEKREAERTAREEAWRRQEVARLNREQEQLAQERAAAASRDAAIIAFLQRIGGQSVQPPATAVVVPMPAPVSVHTTPPKQPSRQQQQPPPPSPQAGQATPQSKPISAAPLQQQPPQQQPKDTSQQDAGTPRSLPPASSQSLELVPVAATEHHVDSGLGGGDGGAASSSRWPKTEVHALIQLRMDLDMRYQETGPKGPLWEDISSGMRRLGYNRSSKRCKEKWENINKYYKKVKESNKKRPEDSKTCPYFHQLEAIYNRKHLRSLTTAATSSAAAAPRPAYPDQLNPSRQEIEGKNINDDKRNNGGSGGGTQVPTSNGETATTTTTTTLVAFDADTGMKKPEDIVRELNEHPRREFTTEDETDSDDMGDEYTDDGEEGEDDGKMQYRIQFQRPNPGGTNTAPAPAAATTAAPAVPTSAPTSTFLAMVQ

SEQ ID NO: 2751 - protein, 1469 aa, Zea mays
MPDATGLEMGLKGSKGAPVPGMEGGVAKAPASLEENKSSADEDLGRGPALTGKKRRDCRGSADEDRNVTKRVLRSDAMKLRAEAEAACVVAVEVSKTDSLERKRCEAIVEAEPCNSRLLMEVTCNGEEANELVNLDSSDVSEESARCSENNMGMPSVPATDSSQDNGLGTQSSLAESDIKTMKSDEKMSTATLSECNDSRAGMNSLSVDEAQDDKVRHGPCQGEVIDSAMANDAGTSTNLIKISPTSGSESVKQENNVVGTEEVILHSSDTKVEKHSHIDDVCTETEISLTDNGICAVDNHTDLTGCTKQEERGSPMNEANDVSSHDIVFTRRGRKSCEAKQRTCEEEARFEKRITRSATVRQREVSASSHKTSTNEAALEGRGRKGDIVAHYTRKVSSAVSPKGHHAELGDCNTSMPKQTVKETVVDRRDSGVPENDNHANVTENKESENGKEINLKTQPPVGIVKKTSGGGVSAVDQNVSGSAITERNDTEHTDSDGVKSENKTPVQKPLLSVGAKIVASKKRILEAELDKSTGRSPIALPSMKKTRNMSSGPEINQPDKSTGDKLIENNCDSGNKRVLRERQHRNQTNLSTRYSNHSNQNDMEQTQDQSDDDEISSDTSYRRTRSRRRCGAARLAVPKQEDSSDSEDFIAVKKNRRKRKKSVHKQRAGSKLKHTSGPSKAGRLGRPPLIKSESSSLSLQPGKGERKVPEGTGTLREEKQKISDQIKAMLLDAGWTIDLRPRNGRNYMDSVYIPPSGKGSYWSVTKAYYAFRAGMESEQQESPKDQSLSTKSVGSPDKRQVSSSSGYTLTEDILSKLKRVVVNKRTTKLEIQRLRQKRFKKEKKKKNVSNSRSLHLGNERKKRGGCALLARGSNKESGSSTDGFVPYEWKRTIFSWLIDLDVLSVNTKLKCMDGSHSKVLLEGFATRDGINCSCCNEVYSVLEFVTHAGSEVNKPYRNILVDGLDIDLLHCLINAWNMQSDVERQDFFPVSIEGDDPNDDTCGICGDGGNLICCDGCPSTFHMSCLGLEVLPSDYWCCANCSCKFCHEHSSDGAEDTADVDYSLHTCSQCEEQYHEACSPETDSITNLSSQTGNLFCQQSCRLLFEELQNLLAVKKDLEPEYSCRVVQRIHEDVPEEVLALDKRVECNSRIAVALSLMDECFLPIIDQRTGINLIRNVVYSCGSNFARLDFRGFYIFILERGDEIIAAASVRIHGTKLAEMPFIGTRNMYRRQGMCRRLVDGIEMILSSLNVEKLIIPAITELVDTWTSKFGFSPLEDSEKQEVKSISMLVFPGTGLLQKPLLKALPNEEQCSQGDKTEKASDVVNEDSPCSDASADPLGLGVKEHEDSSKDADGTCNGDVSQECPHSWFFYVFASAFLESNLIPLEIIRLIPVFVPVERIRFAGMCLFVLPVKESFCRQAGVCDAGAAKVIEDLVLDILWKRGGRPCQPALEQNSASDLIPFSSAT

SEQ ID NO: 2752 - protein, 233 aa, Zea mays
MELEAAPDDKVFCSDDEMQTLWPLGQVDPKSVRFPCCIVWTPLPVVSWLAPYIGHVGIAREDGTVLDFAGSNLVSVDDLAYGSVARCLQLDRAKCCFPANPASHVCLRSHEHSDAGTAISWDDALRSGSRRFEHKCYNLFTCNSHSFVADCLNRLAYGGSVGWNVLNLAALVWLRGRWLDPMAAVRSFLPFAVVSCVGVLMAGWSFLLGMTAFTLLLLGWFVLGVYCMKGLVV

SEQ ID NO: 2753 - protein, 215 aa, Zea mays
MGCKTTSAPPAASPLPSPRPPIVCVVGFPFPGRCSWWRNGAYKSLASPASGNTSILASSLALLATPVLLTATASRSSCSVSQTLLLCCCTCKSATAHTEMSTTVSRASLDQKLALAKRCSREATLAGAKAAAVATIASAIPTLASVRMLPWAKANINPTGQALIVSTVAGMAYFIAADKKILSLARRHSFEQAPEHLKNTSFQGTGRPHPAFFRP

SEQ ID NO: 2754 - protein, 519 aa, Zea mays
MVRFLRRGHSLHKTGSHNSNQQQQLLRERYLDRSGSDTGEMYSNGAGGTPPLANSQAAAAGAARLRQGRDGPLSELDVMKEKFAKLLLGEDMSGTGKGVPSALALSNAVTNLAASVFGEHRKLEPMAPDTKERWKREVGWLLSVTDHIVEFVPTRHTSENGITMEIMSTAQRRDLAMNIPALRKLDAMLLGYMDNFADQTEFWYEKGGDNKRDDDKWWMPTVKVPSEGLSDVTRKWLQYQKECVNQVLKAAMAINAQVLVEMEIPEVYIESLPKKGKTSLGDAIYRSITEDTFDPVEFLAGMDLSTEHKVLDLKNRIEASTVIWKRKMQTNKDSKSSWSSIVSFEKREQFEERAETILHLLKLQFPGTPQSQLDISKIQYNRDVGYALLESYSRVLESLAYSVMSRIEDVLSADAAAQNLTATEAARRVLESADLLAPRKLDAKEELEKLNEAPASMTLFDFMGWHFDQDELMKRREDGTLDADGEAMLLKKAPSVAPKKFSYVDSLSSGGMRSPSARH

SEQ ID NO: 2755 - protein, 768 aa, Zea mays
MGAGNNKRGHPLLRGGSAKRERYTHGFSASQMAALTALCGALVPSLPPADRRNGHHHNPQPEEDGGSSKVVEEFLLASAADPPVPGEVAELMSRKCLPEALALVRAVLWLLGTRLGSLALCGARCLSWRFPFVRRFDELPLEHREAALRRWSRLTLLPPLRMFFLITKVFCLYVFYSWTDENSKNPHWRAIGYSPPPADDEPAPAESERPEKRPLDDGIVETNKENDASLPALLAEKGLRVADDAARNVCRVECDVVIVGSGCGGGVAAAVLAAAGHKVVVIEKGNYFTARDYTAIEAPSMEHLYEGGGFVSTLSASALLLAGSTVGGGTAVNWSACIKTPDDVRGEWARDRGLPLFATGEYAAAMDKVFERLGVTAGCAEEGLQNKVLRKGCERLGYKVESVSRNSSEGHYCGSCGYGCRTGDKRGTDSTWLVDAVSRGAVILTGCKAEKLLLEPGSAADGRAKRCVGVVARSTNPAITRTLEVTARVTVSACGSLLTPVLLRGSGLRNRHIGKNLHLHPTALVWGYFPDTVPDLRGRMYEGGIITSLHKVEGGGPGAPARAILEAPAMGLAGAGTQFPWVSGRDMKERMLRYGRTVHLFSMVRDRGSGTVHGERRVAYHLDATDRENMRDGMRRALRVLAAAGAAEIGTHRSDGQRFACGGATEAALEEFLDGVDVVRGPQSKAEAWTLCCTAHQMGSCRMGATARDGAVDARGESWEAGSLYVCDGSVLPGAVGVNPMVTIQSVAYCLATGIAESLRRGPVSRKD

SEQ ID NO: 2756 - protein, 376 aa, Zea mays
MALLKAARVADVPTLDVVVAPGLVAVAKARSAAAVGGRFSVIGHRGKGMNALASEDPRLREVRENTVRSFNDAGRFPVDYVEFDVQVTKDGCPIIFHDNFIFTQDDGKISQKRVADIQLEDFLQYGLQNEQGKVGKPLLRRLKDGRMVNWNVQSEDALCTLEEAFEKVNPRLGFNVELKFDDSLEYTEEELTRILQAILKVVFEYAKDRPILFSSFQPDAAQLMRKLQGTYPVYFLTNGGTELYADVRRNSLEEAVKLCLAGGLQGIVSEARGIFRHPAAVPKIKEANLSLLTYGTLNNVPEAVYMQHLMGVNGVIVDLVPEITEAVSELIALPEPDLDLEVGSLSNQAAARGATTPNFSQREISFLLRLIPELVQ

SEQ ID NO: 2757 - protein, 335 aa, Zea mays
MAFPTAMAAVAVALCAAFALAALGGAEAQQLSPAYYDDSCPHVYDTVRRVIQEARASDPRILASLLRLHFHDCFVNGCDASLLLDETPTMRSEKEANPNKGSARGFPVVDDIKAALENACPGVVSCADVLALAAEVSVELAGGPYWRVMLGRTDGMAANFDGAQNLPNPTEPLNDLKQKFADLGLDDTDFVALQGAHTIGRAQCRFFQDRLYNFSDTERSDPTLDRSYLAALRESCPAAVSDNTCLNNLDPATPDTFDNRYYANILSNRGLLRSDQAMLSAPEEGAVSTAPIVGRFANSQVEFFQSFATAMVKMGNIAPMTGGLREVRRNCRVVN

SEQ ID NO: 2758 - protein, 567 aa, Zea mays
MCEVSDRLFKSPEHGMDFSPQRKSGERDPVSFVEHDDSDDDFGAESTASNKPSAHSHDRTKSKPKTSHGSSTHATTATPLPPQSSSEPTAATATATAGNNADANSVDSGGPRSNSMESSSSSTASGATPANVRRHTGGDSQWEAIQLATSLDAPLNLGHFRLLKRLGYGDIGSVYLVELRATPAFFAMKVMDKASIISRNKMARAQTEREILGLLDHPFLPTLYTHFETDKFYCLVMEYCSGGNLHSLRQKQPGKHFTEPAARFYVAEVLLAMEYLHMLGIVYRDLKPENVLVRTDGHIMLSDFDLSLRCTVCPTLVKSSSVHSTGSGGGGGVGSVGRGGVDVADSDVITANQGCIQPSSFFPRILPRRSRKPSKSDLGLGGPPAVEFNAEPTDARSMSFVGTHEYLAPEIIRGEGHGSAVDWWTLGIFLYELLHGSTPFKGAGNRATLCNVIEQPLRFPSDGGAGGPAVSSVAKDLIRGLLVKDPQKRIAFTRGATEIKQHPFFEGVNWALVRSMVPPSVPDPVDFRQYGAAKDKKAPDSSTTAAVEAPPVGKQNSGESYTDFEYF

SEQ ID NO: 2759 - protein, 459 aa, Zea mays
MDALSRPAVVIDNGTGYTKMGFAGNVEPCFITPTVVAVNDSFSGSGQPAARGAPARGNWLAQHSAGVMADLDFYIGQEALARSRASSSHSLSYPIRNGQVENWDSMERFWQQCIFNYLRCDPEDHYFLLTESPLTAPEIREYTGEIMFETFNVPGLYIAVQPVLALAAGYTTTKCEMTGVVVDVGDGATHIVPVADGYVIGSSIRSIPITGKDVTQFIHQLLKERGENIPPEESFDVARRIKEMYCYTSSDVVKEFNKHDREPSKYVKHWTGIKPKTGAKYTCDIGYERFLGPEIFFNPEMYNNDFTTPLQVVIDRCIQSSPIDTRRALYKVLLICVLLLLFILRHRIECKEFPMAQNIVLSGGSTMFKDFHRRLQRDLKKIVDARVRASNSRLLSGDAKAQPIEVNVVSHPIQRYAVWFGGSVLASTAEFYEACRTKAEYEEYGASICRSNPVFKGMY

SEQ ID NO: 2760 - protein, 225 aa, Zea mays
MDGRRRRQWPRSRSGAAAARLLLLLLLAVSLGGHGDHGAAAAGVAPAGGNGMTELQKHVAFFDRNHDGIITFDETYQGLQDVGVGDVTAKASAAFINGALGPKTRPDNSNSSRMDIYVENIQKGKHGSDTGAYDAQGRFVPAKLDEMFTKHAKTVPNALTKDELDEMLKDNREKMDVAGWLGAKSEWEMLYKLAKDKDGRLPKDTVRAVYDGSLFYQLAAQAKKG

SEQ ID NO: 2761 - protein, 245 aa, Zea mays
MVMASSSGLRSCSAVGVPSLLAPSSRSGRLAPFCANATTSGRVTMSAEWMPGQPRPAHLDGSSPGDFGFDPLGLATVPENFERFKESEVYHCRWAMLAVPGILVPEALGLGNWVKAQEWAAVPGGQATYLGAPVPWGTLPTILVIEFVAIAFAEHQRTMEKDPEKKKYPGGAFDPLGFSKDPAKFEEYKLKEIKNGRLAMLAFVGFCVQQSAYPGTGPLENLASHLADPWHNNIGDIIIPRSISP

SEQ ID NO: 2762 - protein, 610 aa, Zea mays
MKYSKEDKPERAGGAGAGSRAVPVALVVVVLCAFSFYLGGIYSTGRSLLDSIQPAPTALLALGAATTTRRPSDDGQARPALASTAAVAFPECPADYQDYTPCTDPKRWRRYGNYRLSFMERHCPPPPDRQQCLVPPPKGYKPPIRWPKSKDQCWYRNVPYDWINSQKSNQHWLVKEGDRFRFPGGGTMFPNGVGAYVDLMQGLVPGMRDGTVRTALDTGCGVASWGGDLLGRGILTVSLAPRDNHEAQVQFALERGIPAILGIISTQRLPFPSAAFDMAHCSRCLIPWTEFGGLYLLEIHRVLRPGGFWVLSGPPVNYENRWHGWNTTAQAQKADLDRLKKMLASMCFKLYSMKGDIAVWQKSADACYDKLTPVTTPAKCDDSVDPDAAWYVPMRSCVTAPSPKYRKLGLNATPKWPQRLSVAPERISVVPGSSAAAFKQDDARWKLRVKHYKTLLPALGSDKIRNVMDMNTVYGGFAGSLIKDPVWVMNVVSSYGPNSLGVVYDRGLIGVNHDWCEAFSTYPRTYDLLHLDGLFTAESHRCEMKYVLLEMDRILRPTGYAIIRESTYFLDSVAPIAKGMRWSCEKHSSENKADKDKILVCQKKLWAGKQ

SEQ ID NO: 2763 - protein, 125 aa, Zea mays
MIMNTTQKANLVEQDAKVFVKQAPQFKRWGRKHPFVRYGLPLISLTVFGAVGLAHLIQGSKEVTKEKEDMEWEVVETTKALSRTGPVEGAYKPKKLSLEDELKALQQKVDINSYDYKPIPRPSEK

SEQ ID NO: 2764 - protein, 220 aa, Zea mays
MAANGGGYRAEDDYDYLFKVVLIGDSGVGKSNLLSRFTKNEFSLESKSTIGVEFATRSLQVDGKVIKAQIWDTAGQERYRAITSAYYRGAVGALLVYDVTRRATFDNVGRWLRELRDHTDQSIVVMLVGNKSDLRHLVAVSTDDAKEFAEAESMYFMETSALDATNVDSSFSEVLTQIYQIVSKKTVEASEEGAAAPGKGEKINVKDDVSAMKRVGCCSN

SEQ ID NO: 2765 - protein, 505 aa, Zea mays
MAIPLPCKALPRHDGTKGSGQAYDGDDQPSVAAELRALWGMAAPVTALNCVVYLRAMVSVLCLGRLGPLDLAGGALAIGLTNITGHSVLFGLASGLEPLCAQAFGSRNHELLTLSLQRAVLLLLLAALPIALLWLNVGPILVALGQDPTISAHAASYAAFALPDLAAGAVLQPLRVYLRSQGITRPMAACSAAAVALHVPLNVGLVFGLGLGVRGVAAAQALTNANMLLFLLAYVRWARACEHTWKGWARPADVAAGLPALAGLAVPSCVGVCLEWWWYEVVTVLAGYLPNPAAAVGAAGVLIQTTSLMYTVPMALAASVSTRVGNELGAGKPRRARMAALVALWCALAVGVLHVAWTVALSRRWVELFTADPGVVRLASAAMPVVGLCELGNCPQTAGCGVLRGTARPAVGARINLLSFYLVGTPVAVYLAFGARAGFRGLWYGLLSAQATCVALVLVAVVWRTDWRVEAMRAKKLAGLELTNDAEEESRRLVAATGEQAEDTS

SEQ ID NO: 2766 - protein, 240 aa, Zea mays
MGRGKVELKRIENKISRQVTFAKRRNGLLKKAYELSLLCDAEVALIIFSGRGRLFEFSSSSCMYKTLERYRSSNYSTQEVKAPLESEINYQDYLKLRTRVDFLQTTQRNILGEDLGPLSMKELEQLENQIEVSLKHIRSRKNQMLLDQLFDLKSKEQELQDLNKDLRKKLQETSPQNVIHDVSWEEGGHSGSSVLGPFQGLLQYHGNDPSLQTRYHQQAYMDQLNEDMADPDEHGRSGWI

SEQ ID NO: 2767 - protein, 140 aa, Zea mays
MHTLLIISHCLCCKKDTGYMILHLYCDSPRAARARHGHTHTYTRTPLPCIFSPTEDDGDLPKMYSCPTWPIERLQAARAPRALSSTGHAPPSELAPDVVFTVVAAAGEAEGGALHIWATWQQHQANVGGYKLERAGTPCW

SEQ ID NO: 2768 - protein, 408 aa, Zea mays
MEAGGASGGDDGDGQLHGLKFGKKIYFEDAGGSSSSGGSGSASATAPPATQQPSPPAASPRAAPGGGRRGRAAAGGAGPSLPPAPPRCLVDGCNADLTDAKTYYCRHKVCEMHSKEPRVVVNGLELRFCQQCSRFHNLAEFDQQKKSCRKRLAGHNERRRRPPPGPLASRYGRLAAPLGEEPGGRFRSFMLDFSYPRVPSAMRDGFPAVRPGGERVPGSNIQWQAASLDPPPPHHQSAAAGYGAHSYGSPGSSSSSRPPVFPAGPELPPGGGCLAGVPTDSSCALSLLSTQPWDAAGHSAGHGHGHAASLPATAGFDGNPVAMASSYIAPPSPWTDSRAHEGGRRNVPQLPPDVPLGDVHSGPGTHHGQFSGELELALQGNRPAPAPRNGQGSAGAFDQAGSTTEWSL

SEQ ID NO: 2769 - protein, 434 aa, Zea mays
MGTNMYPSSSLLGDKKGDIAVLPVDELIEQADGFAGVFPEHKYEIVQRLQARKHICGMTGDGVNDAPALKIADIGIAVADATDAARGASDIVLTEPGLSVIISAVLTSRAIFQRMKNYTIYAVSITIRIVLGFLLLACFWKFDFPPMLVLVIAILNDGTIMTISKDKVRPSPHPDSWKLAEIFATGVIIGAYLAVTTVLFFWVIYKTEFFVRVFHVRTMNRKKIEETGDQNLLADNMEMLASAVYLQVSTISQALIFVTRSRGWSFMERPGLLLMAAFVIAQLIASVLAAMVSWELAGIKGIGWRWTGVIWLYNLVVYLLLDPIKFAVRYGLSGKAWNLVIDHKVAFTNRKDFGKEAREAAWAHEQRTLHGLESAGTPGEKAASVELGQMAEDARRRAEIARLRELHTLKGKVESVVKLKGLDLEDINNQHYTV

SEQ ID NO: 2770 - protein, 1779 aa, Zea mays
MTTPRGTQRRAAAPAAAAGGEPYNILPIHDLLAEHPSLRFPEVRAAAAALRAVGGLRPPPFSQWRADQDLMDWLGAFFGFQRDNVRNQREHLVLLLANAQMRLSSADFSDTLEPRIARQIRKKLLRNYTSWCGFLGRRPSVYVPEGDPRADLLYTGLHLLVWGEAANLRFMPECLCYIYHHMATELHRILEGFIDTATGRPANPAVHGENAFLVRVVTPICDVIRAEAESSRDGKAPHAAWRNYDDINEYFWRRDVFDRLGWPMEQSRQFFRTPPDRSRVRKTGFVEVRSFWNIYRSFDRLWVMLLLYLQAAAIVAWEGAKWPWDDLLSSRGSESKDTQVRVLTVFITWAALRFLQSLLDIGTQFRRAFRDGRMLAVRMVLKAVVAAAWVVAFAVLYMRVWNQRTDNGQWSSAADSRMRSFLYAAAAFVIPEVLAIVLFIVPWVRNALEKTNWKICYALTWWFQSRSFVGRGLREGTFDNVKYSIFWVLLLAVKFAFSYFLQIRPLVKPTKEIYNLNGIQYTWHEFFGQSNRFAVFVLWLPVVLIYLMDIQIWYAIFSSLSGAFVGLFAHLGEIRDMKQLRLRFQFFASAMSFNIMPEEQQVNESFLPSRFRNFWQRLQLRYGFSRSFRKIESNQVEARRFALVWNEIISKFREEDIVSDREVELLELPPELWNVRVIRWPCFLLCNELSLALGQAKEVTGSDRRLWRKICKNDYRRCAVIEVYDSAKHMLLEIIKEGTEEHGIVTQLFSDFDGSMKMEKFTVEYKMTELHNIHTRLVALLVLILKPTKDVTKIVNALQTLYDVVVRDFQAEKRSMEQLRSEGLAQSRPTRLLFVDAVVLPEEDNATFYKQVRRMHTILTSRDSMINVPQNLEARRRIAFFSNSLFMNIPRATQVEKMMSFSVLTPYYKEEVLYSKDQLYKENEDGISILYYLKQIYPDEWEYFVERMKREGMSDINELYSEKERLRDLRHWVSYRGQTLSRTVRGMMYYYEALKMLTFLDSASEHDLKTGSRELATMGSSRIGSSRHDGVAGGSGYYSRASSSHALSRASSSVSSLFKGSEYGTVLMKYTYVVACQVYGQQKAKNDPNAFEILELMKNYEALRVAYVDERQINGNEKEFFSVLVKYDQQLQREVEIYRVKLPGELKIGEGKPENQNHALIFTRGDAVQTIDMNQDNYFEEALKMRNLLEEFNRYYGIRKPKILGVREHVFTGSVSSLAWFMSAQETSFVTLGQRVLADPLKVRMHYGHPDVFDRLWFLGRGGISKASRIINISEDIFAGFNCTLRGGNVTHHEYIQVGKGRDVGLNQVSMFEAKVASGNGEQTLSRDVYRLGHRLDFFRMLSFFYTTVGFYFNTMMVVLTVYAFVWGRFYLALSGLEDYINKNTSSSNNAALGAVLNQQFVIQLGLFTALPMIIENSLEHGFLTAVWDFMKMQLQFASVFYTFSMGTKTHYYGRTILHGGAKYRATGRGFVVEHKKFAENYRLYARSHFIKAIELGVILTLYASYGSASGNTLVYILLTLSSWFLVSSWILAPFIFNPSGFDWLKNFNDFEDFLNWIWFRGGISVQSDQSWEKWWEDETDHLRTTGLWGCILEIILDLRFFFFQYAIVYRLHIADNSRSILVYLLSWTCILLAFVALVTVAYFRDRYSAKKHIRYRLVQAIIVGSTVAAIVVLLEFTKFQFVDTFTSLLAFLPTGWGIISIALVFKPYLRRSEMVWKTVVTVARLYDILFGVIVMAPVAVLSWLPGLQEMQTRILFNEAFSRGLHISQIITGKKAHVF

SEQ ID NO: 2771 - protein, 753 aa, Zea mays
MKVVSIHLAAAVVAVLLLLAAKRTPAIAVPSPQCQWQCGGVDIAFPFGIGDNCSLSAGFNLSCQEVQSGVYRPFQGNIEVLNISLINGTVRELNPVSTYCYDSSSGSMESSTWYFDASGTPYRFSDVQNKFTVIGCQTLAYITDNTDKSYQSGCVSTCQNVSDLTDGSCSGMGCCQTNIPKKMGFYNVSFDPASDTSQISRLGLGSCSYAVLMEAEEFSFSTTYITNTTAFNDTNSGRVPVVMDWAIRDDGAPSCELATRNETGTYACRSGNSKCVESPNGPGYLCNCSGGYEGNPYLPDGCHDVDECKKNSPCPSVGGVCHNTVGAYRCSCRAGRKLNKQNNTCDPDTTLITGVTIGFLVLVIFSSFGYMILQKRKLNQVKQDHFRQHGGMILFERMRSENGLAFTVFSEAELVKATDSYDKSRIIGKGGHGTVYKGIVKGNVPIAIKRCALIDERQKKEFGQEMLILSQINHKNIVKLEGCCLEVEVPMLVYEFVPNGTLYELIHVKNQALQIPFSTLLRIAHEAAEGLSFLHSYASPPIIHGDVKSANILLDGNYMAKVSDFGASILAPSDKEQYVTMVQGTCGYLDPEYMQTCQLTEKSDVYSFGVILLEVLTGQEPLKLDGPETQRSLSSKFLSAMKENNLDAILPSHVNGGQESNELIRGLAQLAKQCLDMCGCNRPSMKEVADELGRLRKLSLHPWVQINAEMIESQSLLSGTTTASFEIEVGTTGYPTQEAENLPMNPRSSYYAR

SEQ ID NO: 2772 - protein, 362 aa, Zea mays
MNHLTPALHGAMRPPSAQGQGLARYGSAPGSLLAAIADSVTRGDPAPPPPPVSRFYSAESSGLTSCDSSCRTDCGRPPLERAYGGSGEIRVPPPLQQQQHHLLAPPAASPLFRHSSSPAGLLSRLMTDPHGMAASGGAMGSYTQAGSDAALGPGHGHGHAQLSSQWSFSRQDLPQISEMGMIPADIGESIVGAGGCNSSSDAAQSSSYLSRTFSVGSWDDTNSIMFSSAPCKKPKVDPAAGADDMVTNFSTIDPQFGLSNSSLELPGMDDYLQLQQDSVACRVRARRGCATHPRSIAERERRTRISKRLKKLQDLVPNMDKQTNTSDMLDLAVEYIKELKDQVEKLKHDQANCCCLGNKSCC

SEQ ID NO: 2773 - protein, 260 aa, Zea mays
MAASALHQTTSFLGQALVSRAAGVDAGGRITMRRTVKSVPQSIWYGPDRPKYLGPFSEQTPSYLTGEFPGDYGWDTAGLSADPETFARNRELEVIHSRWAMLGALGCVFPEILAKNGVKFGEAVWFKAGAQIFSEGGLDYLGNPNLVHAQSILAIWACQVVLMGFVEGYRVGGGPLGEGLDKVYPGGAFDPLGLADDPDTAAELKVKELKNGRLAMFSMFGFFVQAIVTGKGPIENLFDHVADPVANNAWAYATNFVPGN

SEQ ID NO: 2774 - protein, 509 aa, Zea mays
MIANGLRKSSAASSQVSKLVKYIASAGSLQGGHSLSEPSARHYSSEPSLQATEENGFKGHSMLAPFTAGWQSTDVHPLVIERSEGSYVYDSNGKKYIDALAGLWCTALGGNEPRLVKAATEQLNKLPFYHSFWNRTTKPSLDLANDILSMFTAREMGKVFFTNSGSEANDSQVKLVWYYNNALGRPDKKKFIARSKSYHGSTLIAASLSGLPALHQKFDLPAPFVLHTDCPHYWRFRLPDETEEEFSTRLANNLENLVLKEGPETIAAFIAEPVMGAGGVILPPKTYFEKIQAVLKKYDILLIADEVITAFGRLGTMFGCDMYNIKPDLVSIAKALSSAYMPIGAILVSPEITDVIYSQSNKLGSFAHGFTYSGHPVSCAVAVETLKIYKERNIVEHVNKIAPRFQEGIKAFSGSPIVGEIRGLGLILGTEFVDNKSPNDPFPAEWGVGSIFGAECEKRGMLIRVAGDSIMLSPPLIMTPNEVEEIISKFGDALKATEERIVELKSRKN

SEQ ID NO: 2775 - protein, 460 aa, Zea mays
MADHPMKPPASGSMCALACLFLLSAGILLAAAVYRPFQSRAAASWDPFSRVQQKEEAPAPPPLARRGSYRAAPPAPDAVSPSAGGPADWSPDDDDDADAGPPSPAPAPSEEGWGDGDEDAQCDLFDGEWVEDAAGYPLYDAAECPFLSDQVACRRNGRPDSGYERWRWQPRGCGGTTRLGGAEALELCRDKRLVLVGDSLNRNMWESLACILYAAVPDRLRTRLIDDAGSEYMIFRAMDYNCSVEFFWSPFLVKLETKDNKTKALELDQLPPMLQRTLGADVLIFNTGHWWTHTGKLRAWDHLEWGGKTVQMAGEEAFDGALRTWARWIDYNIDPSRTRVFFRSVSPEHKSVNWCYNQTAPISRGNIAPWFPQSLIDIIEKNIKRMKTPIVYMNITRLSELRIDAHPSIYTITHEGKPLSKEQRQQPLTYSDCSHWCLPGLPDTWNMLLFNFLIRPLPST

SEQ ID NO: 2776 - protein, 461 aa, Zea mays
MPLPAAMRSSMLRGRCNLFLPFAARCSQAGGGGGGGCSLLLPRRWQSSLPQLDHVADRSNEESGGEIDWDNLGFGLTPTDYMYVTRCSPEDRGDFPRGELCRYGNIELSPSSGVLNYAQGLFEGMKAYRRPDRAGYTLFRPEENARRMQRGAERMCMPAPSVEQFVHAVRQTVLANRRWVRAYVPLFARPAPATRRRRPAITCVPCVPFAGAAAGEGSPVPPASARGERPDPWAGSGPRVHLPHLRRTRWELLQGQLVSTATPVPFLLNRERDATLIFFFQEGLAPINLVVHDEFHRAMPGGTGGVKTIANYAPVLRAQMDAKSKGFTDVLYLDSVHKRYLEEVSSCNVFVVKGGVVATPDTRGTILPGITRKSVIELARDRGYKVEERLVSIDDLVAADEVFCTGTAVVVAPVSTVTYQGERYEFRTGPDTVSQELYTTLTSIQMGMAAEDSKGWTVAVE

SEQ ID NO: 2777 - protein, 340 aa, Zea mays
MDKYWEETQRYLEYEELSIYLEAQEDAMSCYDSSSPDGSISHSSSSAAACGNKNILMERDRRRKLNDKLYALRSVVPNITKMDKASIIKDAIEYIQQLQVEERRVLQELRVLDDDTAAAATAQVECCDVDGGLLRREAERAKKMKRAQSVASGAQSAPPPPPPPHVEVLELRVSEVGDHVLVVSVTCRKRRDAMARVCRAIEDLRLRVITANVTSVAGCHVHTVFVECGNGNLDSHVLDQSIGSPHSHGIHSSHVLQMQDWEREKKLGAEDLSPPGSYHAMTITRWVGSHHVRHLSPRRQTHMAYCSSTSNHFLPFFGDSDLMKMKQIKRVGEDICKKWT

SEQ ID NO: 2778 - protein, 125 aa, Zea mays
MAEATDTAAATPPPAPAMATLSPPPKSGIPPRYNLDAKWDACLDLSIRRVAYSSLAGALAGLLLFRSPTTRWASVTLGAGVGIGAAYTECSYLFSGGPPNWSPKVSTIPSAHSEVIALSFSLNPV

SEQ ID NO: 2779 - protein, 2218 aa, Zea mays
MESPTYTPKVVHPTTDAIEPNGSALTPCDWVIPDIASNPFLPASTQIEDADSLRMSTRPLRRKQHVPRGERQAILARRNRQFEASISRNMATVAEDIISDAEEGDDWTQPHMTEKINNNGNYYHFYPPFYPECPGILCVLYFHPPVDDDDGVVFEDDADENEGYLFAGQYEDTDEDIEIDGSQDESSAIDVPDPYDKVYSNIPEETHMLKTVPNCGYCTAKKFEYETPGFCCRGGKVELAPLETPPQLKRLWDSADSDARHFRDNIRFFNGHFSFTSLYCCLDSMTTNVRDSGIYTFRAQGMMYHNIKSFGRDGGAEHKHLELYFYDDDPTLEHRYRKCREEHQQKDKEVIRQIVDILRGNPYFEHLRTMGHVENLDDYRIALNLDQTLNQKTYITPLTSEVAAVWIEGSEGRGQFSKSVMLHGKDSSSHCIRSYHGCYDALSYPLFFPRGELGWHANIPKVGVSMDEVDAYRATHRASNANDEDAGPRRNDLTIYWALGPFVSDYYCYKFQIRPGVFNPILHGKRLFQQFAVDTYIKIENSRLDYIRKNQDRLRADLYQGLVDSMLDGDIRGEKVGKRTVLSTSFIGGPRDMRRRYMDAMALVRKFGKLDIFLTMTCNPNWDEIRRELLPGQTPQDRPDLVVRVFHAKLQELKHRLTKQDILGKVRAYVYVVEFQKRGLPHAHFLLIMQRKYKLTCPEQYDLLISAEIPSNKYPELRKMVIKHMMHGPCGSLNPNCPCTKGRKSCKNHYPRPFSDTTLQGKDSYPIYRRRDDDRKEKVRGCELDNRWVVPYNPYLLRLFNCHINVEACGSIKAVKYLFKYIYKGHDRASVVMRDASKADDDVDEIKQYRDARWVTPPEALWRIYGFELSQISPPVMQLQLHLPNMHMVAFHERQMVERVVNRPGVDRSMLTSYFEANRLHEEARGILYRDFPEWYTWQSGKGKVWQRRKRDTGGQVGRIVSAHLAEGERYYLRVLLNHVTGAASYVDLRTVDGVTLPTFREAAERRGLLESDNTLDECLTERALFQMPSSLQRLFATILVYCEPSDVAVLWQKHKDSMSEDYQHKSQNKTHVQQMVLIDIRNMLQLMGKDIKTFPLPPMIDAYDDAIGTAREVYEEESIQPTVEDVALKDSLNEEQRAAYDKIMSAVDTDQGGLFFVDGPGGTGKTYLYRVLLATLRNQGKIAVATATSGVAASIMPGGRTAHSRFKIPLTIDDGAVCSFTKQSGTTELLRKASLIIWDEASMTKRQAVEALDNSMRDIMGRPALPFGGKTIVFGGDFRQVLPVVRKGSRAQVVASSLRMSYLWESMSHLKLVSNMRAKNDPWFAEFLLRVGGGTEETNSDGDIRLPDDVCVPYSGSDNDLDNLIDFAFPNLNENMSDSTYITSRAILSTRNDWVDMINVKMIDRFQGEHMVYHSFDSAMDDPHNYYPPEFLNTLTPNGLPPHVLKLKIGCPVILLRNIDPTNGLCNGTRLVVRGFQRNSIDAEIVLGQHVGKRIFLPRIPLCPSDEEMFPFQFKRKQFPVRLSFAMTVNKAQGQTIPNVGVYLLEPVFSHGQLYVALSRATARSNIKILVIPAVDGRKKSRKGVKKTPTVDCGTYTKNIVYKEEIPCEPRVEVVLIDDAFVERKWMECLFQPSAYLGDEVIDCYINLIKAQKHLKCRSGGRVHIENAFQFNFLKRDGDLEIKTEELYPIKDMTHICSAERRVLLYLDHDMVFIPINIRETHWYLAVIHARNMEIQVLDSLGTSQDRKDLTDSIKGLQRQIDMISQRKELKDHRWPDLQIASWSLREIDMGYAKQTDSSSCGLFLLNYIEYWTGDELSDSFTQDDMSHFRKKMAAILLSSDLNKRRGCLLYKNEKEVDSGSPSDVEILENPTDSNKRKLLHVLDDSEVVFEDEEGPITQADLQRWFVDDWDKRAPVKVSNDGCTNDFLMVGLSTKDMPVTKADSIDVLCDYIMAIEDDTTLERTWVRSFNPFKIEISVKDLQNILTTTQDMILRCFDMAVRLLANKESRKPKEEIINNRKHYMDMRFWRMVGFGKLPKYHQDPTTEELAKTLDCWPSMNYYITGCRYVLMPWKFNGCHALFVIDHVKKHVTFIDFTPTQDWCKHMPYKRFAEAIIMASKKYKIAYSKKRSGWAEDIFKWEHTIQTGVPIDLRGFNTSYLVLQAMAMWGNDRRLKFVGDAKTLRRNFVIDLLSYEDNSCRYAIPANIQQRLVDIAKKD

SEQ ID NO: 2780 - protein, 689 aa, Zea mays
MACRATLLPLFLFLLVAPEPALATSGTIVFTTLGRSRYAFDVFALTIAPLSAASAELRLTDGASVNYNGNFAPSSSGPPSLLFVSERNGSLNLYLTPVPTSASARRRDALEEEEEDSAPPTPLLPWDPIALKDRPSLTPDGAHLVYVSTAEPAGAPRRSWAAVYSTSLAPGRATRRLTPRGVADFSPAVSPSGVWTAAASPGPRGWAGEVEDLRTDIYVFRTSDGSRRALAVPDGGWPTWADDTTVFFHRRDADGWYGVYRARLTFTDDDVASVVDRITPPGFHAFTPAASPGAPGLVAVATRRPGSDYRHIEVIDLSGGGGGANNRSAYYEVTRPVAPRAHHFNPFISPDGERVGYHRCRGSGNGDSPLLLESIKGPAPDTFSLFRIDGSFPSFSHDGKRIAFVGLPGLYVVNSDGSGGRRRVFSGNAFPTTWDWKRKGVIYTSVGPDFASESTEVDVVAVSLGDGDGDDPSVSIKKLTVGGENNAFPSPSPDGKWVVFRSGRSGHKNLYIMDAEDGEAGGIRRLTEGPWSDTMCNWSPDGEWIAFASDRHNPGGGSFAIYMVHPNGTGLRRVVHSADGGRTNHPWFSPDSKTLVFTSDYAAVSAEPISNPHHYQPYGEIFTVNIDGSGIRRLTHNSFEDGTPSWTPYHLKAEDVGETLQASGTCAFEDCHWLNIAARPDGLMCGKHA

SEQ ID NO: 2781 - protein, 408 aa, Zea mays
MAAAPALARELLDAAREPEFAEWQRGVRRRIHQHPELAFQEHRTSALVRAELDAIGVPYAWPVAQTGVVATITGPAAGPVFALRADMDALPIQEMVEWEFKSKEDGKMHACGHDAHVAMLLGAARLLQSRRDDLKGTVKLVFQPAEEGHAGAYHVLKEGVLDNVQAIFGVHVDTALPVGLVGSRPGPFLAGSARFTATITGKGGHAAGPQHVVDPIVAASSAVLSLQQLVARETDPLQGAVVSVTFIKGGGGAFNVIPESVTMGGTLRSMTNDGMSYLVKRIREVIQGQAAVSRCAATVDLMEEKMRPYPATVNDEAMYSHAKAVAESMLGEASVMLCPQFMAAEDFGFYAQRIPAAFFSVGVRDEATGKVHHVHSPHLDIDEAALPVGAALHAAVAMEYLNKHAPCK

SEQ ID NO: 2782 - protein, 269 aa, Zea mays
MASVGLARVSGVARPLMRLVTMSRMPILQQLHLEEQLLRRTSDNWCIINDGTAPATIVMGVSGRVSELVNIQLVLRDKVPIVRRFSGGGTVIVDQGTVFVTFICNKNVVAGLQPFPRDIMSWSGQLYGKVFDRFGEFHLRENDYAFSHRKFGGNAQSITKNRWVHHTSFLWDYDVKNMDYLKIPKRAPEYRLARNHTDFLCRMKEYIPSRSVFTDGVIAALGEHFSVQPMDLQAILSGDEEFVPSTKLLSQQYLEEIVSSKESLEIIES

SEQ ID NO: 2783 - protein, 1138 aa, Zea mays
MALLVRARLSPLDDDDDASTASSLSSAASSPPLSPAAASTPLPLYARAAVLVAPRIAAQLSSTEEDVSESFDDTTSSGEDVDLPEEVSNGFFFSVARVPPTPTSEDPILVPGGGVAGIAAAEAPEAEGGDGLGAAEEPLEGGIFVSAKNGLDGVEGSLGGSFLKSGSCIGAHNGGEAAASGDSVIVSDGTVLNEEDDKQGEQAVNDAASGPLLMPVAGVDGLVIVDALEGMLDREAAESLPIPSATATGTEGEEAAAELRSDAVGSAAKLDASPEYAATGDVISDAMQVLDSVDDEADGDHEGSDDLTSMPISSSDYAVELAKELENNVPTSIGARFVADDSDDAEINGDDEYEEEMNGKENELFDHTALIELLRAASSSPEQGKAKVFPVESSEPRDLPPTLASNARMNVASAPVPQAIADPEKQMTDEEKKIYGKVDMARIKYMRLVHRLGYDTNHQVPVQVLFRLSLVESFRCVRMTNHSSEIENAWKRALQREAEGTENLEFSCNVLVLGKTGVGKSATINSIFGEDKSKTNAFLPATSSVKEINGVVNGVKFHVVDTPGLGTSAEDEKSNRKMLNAVKKYMKRCPPDIILYVDRLDTPREEANSLSLLRCITSVLGLSIWPRTIITLTHSGAASPEGPNGLEVNYDMVVSRRTHAIQQSIRQITNDPQIQNPVALVENHHLCRRNAEGEKMLPDGLIWRRLLLLLCFSLKMIAEIDSLSTRRASSASFLGRLLQVPPIPYFLSSLLKSREHPKRSNDHNVVSVDSDFYLDELLNGDQEDEDDYDQLPPFKPLSKSQVAKLSKEQQILYFDESDYRTKLLQKKQLKEQLKGFKEMKKKEGDDNDILSDDDHPDDGYDTDRYPMPEWTLPSSFDSDDPVYRYRCPVSTPNLLVRAVYNPDGWDHDFGFDGVSVQHSHDVANKYPASLWVQVNKDKREFTIHLDSSMSVKHGDYASSLAGFDIQTIMNQLSYTLRGETKFKNFKKNITTGGLSMTFLGNSMVAGAKLEDKLLVGNRLTLSGNTGAVSMRGDAAYGVIMEATLREKSYPVGQGVATLGASLVKWHKEWTMAANLDSHVSVGRSSNMSVHVDVNNKLTGRVSIKANTSEQLNIALLGTCSVIMYVWNKMHPSADPNAE

SEQ ID NO: 2784 - protein, 120 aa, Zea mays
MPVVHVLNQGCVIIVCGLIGSWWDWAVRYYIFGLADPFTQACLSVCLQNDGPAHVVCTGRCFDVERERVRERAVLHACTALHCSQSSFVVADAAARGRPILSSLSSLCLSECCWIEEDRG

SEQ ID NO: 2785 - protein, 1002 aa, Zea mays
MAMAPSTAAASTLLPVLLLIATATQCTAADSFSSQDAAALLNLSAAVADPSGYLSTHWTPDTAVCSWPRVSCDATDTRVISLDLSGLNLSGPIPAAALSSFPYLQSLNLSNNILNSTAFPDEIIASLKSLRVLDLYNNNLTGSLPAALPNLTDLVHVHLGGNFFSGSIPRSYGQWSRIRYLALSGNELTGEIPEELGNLTTLRELYLGYYNNFTGGIPPELGRLRALVRLDMANCGISEEIPPELANLTSLDTLFLQINALSGRLPTEIGAMGSLKSLDLSNNLFVGEIPASFASLKNLTLLNLFRNRLAGEIPEFIGDLPNLEVLQLWENNFTGGIPTNLGVAATRLRIVDVSTNKLTGVLPSELCAGQRLETFIALGNSLFGDVPDGLAGCPSLTRIRLGENFLNGTIPAKLFTLPNLTQVELHNNLLSGELRLDGGKVSSSIGELSLFNNRLTGQVPTGIGGLLGLQKLLLAGNMLSGELPPEVGKLQQLSKADLSGNLLSGAVPPAIGRCRLLTFLDISSNKLSGSIPPELGSLRILNYLNVSHNALQGEIPPAIAGMQSLTAVDFSYNNLSGEVPSTGQFGYFNATSFAGNAGLCGAFLSPCRSVGVATSALGSLSSTSKLLLVLGLLALSVVFAGAAVLKARSLKRSAEARAWRLTAFQRLDFAVDDVLDCLKEENVIGKGGSGIVYKGAMPGGAVVAVKRLPAIGRAGAAHDDYGFSAEIQTLGRIRHRHIVRLLGFAANRETNLLVYEYMPNGSLGEVLHGKKGGHLQWATRFKIAVEAAKGLCYLHHDCSPPILHRDVKSNNILLDADFEAHVADFGLAKFLRGNAGGSECMSAIAGSYGYIAPEYAYTLKVDEKSDVYSFGVVLLELIAGRKPVGEFGDGVDIVHWVRTVTGSSKEGVMKIADPRLSTVPLYELTHVFYVAMLCVAEQSVERPTMREVVQILADMPGSTSTTSIDVPLVIEPKEEDGGPEKKQQQQQEGPHDSPPQQDLLSI

SEQ ID NO: 2786 - protein, 929 aa, Zea mays
MKLSAAVLFFSILLQYCTSSGQPDSRGFISIDCGIPENSTYQDLTSTILYVSDRGFVTSGENRNISAGYISPSLAQRYYTVRAFASGVRNCYTLPSLVAGNKYLVRAAFYYADYDGLSTPPVFDLYLGASLWHEVRFRDAAAINWMDVVAVAPTDFLQVCLVNKGTGTPFISGLDLRPLRSTLYPEANASQSLVMVNANRCNVGPTDKSVVRPTKAHFSGPTSRYPLDPHDRIWLAYGAVPAWTEASATSVVRNYLADPYDAPSAVMQSAATPSDGSVLSFSWDTSDDRSVDASSATYLLVLYFAELQRVSASGELRRQFDIAVDGTAWNREPYSPPYLFADSFSGTVQGQARHSVSLTATRNATLPPLLNAMEVYLVRPVDEAATDPGDAKAMIAIQEAYVVSKNWMGDPCAPKAFAWEGLDCTTDPPTGTPRITALNLSSSGLTGPITTYFGDLKALQYLDLSHNNLSGSIPDCLGQLPFLVFLDLSSNDLRGPVPYTLLQKSHNGTLSLRLSNNPNLSGNGSGPKKLNGAALLSAIIIPTVAATALSVTFIALLLRALKEQARRRAVDPTPRDETALLENREFSYRELKHITKNFSLEIGRGGFGAVFLGYLGNGNPVAVKIRSESSSQGGKEFLAEAQHLTRVHHKNLVSLIGYCKDKDHFALVYEYMPEGNLQDHLRLRDTCTHRPLTWQQRLQIALDAAQGLEYLHVACKPALIHRDVKSRNILLTTGLGAKIADFGLTKAFSDSETHITTEPAGTMGYLDPEYYRSYRASEKSDVYSFGVVLLELVTGQSPVVPVDDSVSVHVGEWVQQSLDRGGGVESVVDPSMGRCERGDYDVNSVWKVADLALRCRREASRERPTMTDVVAQIRESVELEAARRSSASGAAAAGGGGGLRSCAGERDAFEVVEGSVGETAGAAPGPAMI

SEQ ID NO: 2787 - protein, 710 aa, Zea mays
MVRGSAAAAALLLLPWLLHAAAAGNGSCARSCGGLTVQYPFGFSPGCEIRLGCDPADGTAWLGKTRELGLLVSNVTARALFLTLRPNCSRRLNASVEALFTKAYAPGSQNGLVVSSCSSASQADHIRNCSVPPSAYLDNSSQCGRAAADSIRCPVLTRPTSVPDRFLNRTRMQALAAECTGLVSAVSYLDAPAPALLLATMELEWWMLGPCRCSSHANCTQVTTPVAGQEAFRCDCPKGSEGDGFAEGVGCREGPKCNPSKYLQGDCGKTIQIVLLVAGIMFGAMVTGVTCLAYQLLKRRSASIRMKRSTKQFLSEASCTVPLYSYREIERATGGFSEEKRLGTGAYGTVYEGRLSDDRLVAVKRIRPSDNGGGVDSVVNEVKLLSCVCHRNLVRLLGCCIEQGQQILVYEFMPNGTLAQHLQRERGPAAMPWTVRLRIAAETAKAVAYLHSEVHPPIYHRDIKSSNILLDFEYNSKVADFGLSRMGKASSPSSVGDPSHISTAPQGTPGYVDPQYHQNFHLSDRSDVYSFGVVLVEIITAMKAVDFTRVPSEVNLAQLAVDRIGRGRVDDIVDPYLDPHRDAWTLSSIHKVAELAFRCLAFHSEMRPSMTEVADELEQIQRSGWAPSADDAAFLSTSSSISSSVASTRVTDRSWGADRSRTERGRVNALVVQETAAKSAVESPVSVQERWFSDGSSPSSNSLLGSRSLH

SEQ ID NO: 2788 - protein, 355 aa, Zea mays
MSGTLNEILLINNGLSSCFPPEIGLLRELTVLDVSFNQLAGPLPPELALMRKLEQLDVAHNLLTGAIPPGICDLPRLNNFTFAYNFFTGEPPACARVVPRDSDRSNCLPNRPAQRTPQQCAAFYARPPVNCAAFHCKPFVQPMPPPRLPSPPPPMLPSPPPPRLPSPPPPMLPSPPPPSPPPPSPPPPSPPPPLMSPPLPPPPLPPPHATSTAAVTTTTITTTAFPTSTIPTPPSASLPPATTTTVPTMPRPAATATLHTNASMATSATILPRPIPTHRPCPIRITSSPTATPSMATSIPSSIRIAAAPSAALTENLRRTNGRIVGSALAPPAMATTCQIHQCTWSLSCLANTVG

SEQ ID NO: 2789 - protein, 305 aa, Zea mays
MAKQDIEASGPEAGEFSAKDYTDPPPAPLIDADELTKWSLYRAVIAEFIATLLFLYITVATVIGYKHQTDAAASGPDAACGGVGILGIAWAFGGMIFILVYCTAGISGGHINPAVTFGLFLARKVSLVRALLYIIAQCLGAICGVGLVKGFQSAYYVRYGGGANELSDGYSKGTGLAAEIIGTFVLVYTVFSATDPKRSARDSHVPVLAMHVIDERANLCLQVLAPLPIGFAVFMVHLATIPITGTGINPARSLGAAVIYNKDKAWDDQWIFWVGPLIGAAIAAAYHQYVLRASATKLGSYRSNA

SEQ ID NO: 2790 - protein, 170 aa, Zea mays
MAPTVMMASSATAVAPFQGLKSTASLPVARRSSRSLGNVSNGGRIRCMQVWPAYGNKKFETLSYLPPLSTDDLLKQVDYLLRNGWIPCLEFSKVGFVYRENSTSPCYYDGRYWTMWKLPMFGCNDATQVYKELQEAIKSYPDAFHRVIGFDNIKQTQCVSFIAYKPPGSD

SEQ ID NO: 2791 - protein, 489 aa, Zea mays
MLRAAASRCARGAVRRLSSSAVMEASPVAVGSRWQSLLDEGDWSYHREWWGEEDGPGEGVQTVFRRHSECGNGVVSVSAYPASLPASEHWPAMERWLQESNSRLYPESASSDQFKVLGYQWRVMRFNDHTRQSTAKVMTCYRTSGQRSLFLMQQPHVLAVPYVKSMVSAGLTALSCSSYDLPQAASGQNTMKILCIGHGGGSLPLFLASKFRGATIHIVEIDPVVVSASVESMGFPASPVKGLSPESMLPSDADDLLWGGIHDRVFLHTADAEDFIGSDGNEYDIVFIDAYDGDDVFPRKLWDVDGAFMKSLEKRVHPVHGTVVVNLHSDSDSEAAEGNADFQSALPMGRHVSQVCRAYMQHFGVAFTAAVPWLCNITLVACRAGGMAGGARRGLSRRDLVLGKLLSKSDTVERALGLPFPCLPYIKNGFTMPTDIKDYACCTKEMAGNILQARVGAAVAVHKRLDYCDSGNRMREVVAAAAAGSGART

SEQ ID NO: 2792 - protein, 362 aa, Zea mays
MILFERMRSENGLAFTVFSEAELVKATDSYDKSRIIGKGGHGTVYKGIVKGNVPIAIKRCALIDERQKKEFGQEMLILSQINHKNIVKLEGCCLEVEVPMLVYEFVPNGTLYELIHGKNQALQIPFSTLLRIAHEAAEGLSFLHSYASPPIIHGDVKSANILLDGNYMAKVSDFGASILAPSDKEQYVTMVQGTCGYLDPEYMQTCQLTEKSDVYSFGVILLEVLTGQEPLKLDGPETQRSLSSKFLSAMKENNLDVILPSHVNGGQGSNELIRGLAELAKQCLDMCGCNRPSMKEVADELGRLRKLSLHPWVQIDAEMIESQSLLSGTTTASFEIEVGTTGYPTQEAENLPMNPRSSYYAR

SEQ ID NO: 2793 - protein, 753 aa, Zea mays
MKVVSIHLAAAVVAVLLLLAAKRTPAIAVPSPQCQWQCGGVDIAFPFGIGDNCSLSAGFNLSCQEVQSGVYRPFQGNIEVLNISLINGTVRELNPVSTYCYDSSSGSMESSTWYFDASGTPYRFSDVQNKFTVIGCQTLAYITDNTDKSYQSGCVSTCQNVSDLTDGSCSGMGCCQTNIPKKMGFYNVSFDPASDTSQISRLGLGSCSYAVLMEAEEFSFSTTYITNTTAFNDTNSGRVPVVMDWAIRDDGAPSCELATRNETGTYACRSGNSKCVESPNGPGYLCNCSGGYEGNPYLPDGCHDVDECKKNSPCPSVGGVCHNTVGAYRCSCRAGRRLNKQNNTCDPDTTLITGVTIGFLVLVIFSSFGYMILQKRKLNQVKQDHFRQHGGMILFERMRSENGLAFTVFSEAELVKATDSYDKSRIIGKGGHGTVYKGIVKGNVPIAIKRCALIDDRQKKEFGQEMLILSQINHKNIVKLEGCCLEVEVPMLVYEFVPNGTLYELIHGKNQALQIPFSTLLRIAHEAAEGLSFLHSYASPPIIHGDVKSANILLDGNYMAKVSDFGASILAPSDKEQYVTMVQGTCGYLDPEYMQTCQLTEKSDVYSFGVILLEVLTGQEPLKLDGPETQRSLSSKFLSAMKENNLDVILPSHVNGGQGSNELIRGLAELAKQCLDMCGCNRPSMKEVADELGRLRKLSLHPWVQIDAEMIESQSLLSGTTTASFEIEVGTTGYPTQEAENLPMNPRSSYYAR

SEQ ID NO: 2794 - protein, 286 aa, Zea mays
MAKDIEAAAAHEGKDYSDPPPAPLVDAEELTKWSLYRAVIAEFVATLLFLYITVATVIGYKHQTDAAASGPDAACGGVGVLGIAWAFGGMIFILVYCTAGVSGGHINPAVTFGLFLARKVSLVRALLYIVAQCLGAICGVGLVKGFQSAFYVRYGGGANELSAGYSKGTGLAAEIIGTFVLVYTVFSATDPKRNARDSHVPVLAPLPIGFAVFMVHLATIPITGTGINPARSLGAAVIYNNDKAWDDHVRPTHTDTTPSPAESSTNNKLSANCLQAWLAAAIPTLT

SEQ ID NO: 2795 - protein, 433 aa, Zea mays
MDALSRPAVVIDNGTGYTKMGFAGNVEPCFITPTVVAVNDSFSGSAQPAVRGTPARGNWLAQHSAGVMADLDFYIGDEALARSRASSSHSLSYPIRNGQVENWDTMERFWQQCIFNYLRCDPEDHYFLLTESPLTAPETREYTGEIMFETFNVPGLYIAVQPVLALAAGYTTTKCEMTGVVVDVGDGATHIVPVADGYVIGSSIRSIPITGKDVTQFIHQLLKERGENIPAEESFDVARRIKEMYCYTSSDIVKEFNKHDKEPSKYIKHWTGTKPKTGAKYTCDIGYERFLGPEIFFNPEIYNNDFTTPLQVVIDKCIQSSPIDTRRALYKNIVLSGGSTMFKDFHRRLQRDLKKIVDARVRASNSRLISGDAKAQPIEVNVVSHPIQRYAVWFGGSVLASTAEFYEACHTKAEYEEYGASICRTNPVFKGMY

SEQ ID NO: 2796 - protein, 377 aa, Zea mays
MADGEDIQPLVCDNGTGMVKAGFAGDDAPRAVFPSIVGRPRHTGVMVGMGQKDAYVGDEAQSKRGILTLKYPIEHGIVNNWDDMEKIWHHTFYNELRVAPEEHPVLLTEAPLNPKANREKMTQIMFETFNAPAMYVAIQAVLSLYASGRTTGIVLDSGDGVTHTVPIYEGYALPHAILRLDLAGRDLTDCLMKILTERGYSFTTTAEREIVRDIKEKLAFVALDYEQELETAKSSSSVEKSYELPDGQVITIGAERFRCPEVLLQPSLIGMEAPGIHETTYNSIMKCDVDIRKDLYGNIVLSGGTTMFPGIADRMSKEITALAPSSMKIKVVAPPERKYSVWIGGSILASLSTFQQMWISKDEYDESGPAIVHRKCF

SEQ ID NO: 2797 - protein, 599 aa, Zea mays
MDKAALVAENSTDAGGSSSSFSGLRAYGRALAQTPRRLARRACAATAPREEMSRVRARSGPRMARALRWWDLVGLGLGGMVGAGVFVTTGRAARIYAGPGLVVSYAIAGLCALLSAFCYTEFAVDMPVAGGAFSYLRVTFGEFAAFLTGANLIMEYVFSNAAVARSFTAYLGTAVGVDAPSKWRIPVPGLPQGFNQVDLVAVGVILLLSVCICYSTKESSVVNLVLTGVHVVFILFIIVMGFAHGDARNLSRPADPAHSPGGFFPHGAAGVFNGAAAVYLSYIGYDAVSTMAEEVERPDRDIPAGVSGSVVLVTVLYCLMATSMSMLLPYDAIDPEAPFSGAFKGRDGMAWVSNVIGAGASLGILTSLMVAMLGQARYLCVIGRSGVVPAWLARVDPRTATPINASAFLGLLTAALALFTELDVLLNLVSIGTLFVFYMVANAVVYRRYVGDPCPGSGQKRRAWPALAFIAAFSLIAISFTLLWQFAPGGAAKVGLLSGTAAVAVAAVVAFQALVPQAREPELWGVPGMPWVPAASVFLNVFLLGSLDRPSYVRFGFFSAFAVLFYVFYSVHASYDAEEGGAVDGGGGGDKLQDQGCDV

SEQ ID NO: 2798 - protein, 288 aa, Zea mays
MAKDIEASGPEAGEFSAKDYTDPPPAPLIDAEELTQWSLYRAVIAEFIATLLFLYITVATVIGYKHQTDASASGPDAACGGVGILGIAWAFGGMIFILVYCTAGISGGHINPAVTFGLFLARKVSLVRALLYIIAQCLGAICGVGLVKGFQSAYYVRYGGGANELSDGYSKGTGLAAEIIGTFVLVYTVFSATDPKRSARDSHVPVLAPLPIGFAVFMVHLATIPITGTGINPARSLGAAVIYNKDKAWDDQWIFWVGPLIGAAIAAAYHQYVLRASATKLGSYRSNA

SEQ ID NO: 2799 - protein, 281 aa, Zea mays
MASAELSREENVYMAKLAEQAERYEEMVEFMEKVAKTVDSEELTVEERNLLSVAYKNVIGARRASWRIISSIEQKEEGRGNEDRVTLIKDYRGKIETELTKICDGILKLLETHLVPSSTAPESKVFYLKMKGDYYRYLAEFKTGAERKDAAENTMVAYKAAQDIALAELAPTHPIRLGLALNFSVFYYEILNSPDRACSLAKQAFDEAISELDTLSEESYKDSTLIMQLLRDNLTLWTSDISVRPMSLTLSFLRTLELDLPEISLPPEQLYFWCLAAGGPC

SEQ ID NO: 2800 - protein, 468 aa, Zea mays
MRRAWTPADERAATTTSEHRRRRRMGKYEMGRTLGEGHFGKVRLARDAGTGRSFAIKILDRQRILAMKIDEQIKREIATLKLLKHPNVVRLYEVSASKTKIYMVLEYVNGGELFDKIALKGKLTEKEGRKLFQQLIDAVGYCHEKGVCHRDLKPENVLVDAKGNIKVSDFGLSALPQNQRKDGLLHTTCGSPNYIAPEVLLNKGYDGSVSDVWSCGVILYVMLTGSLPFDDQNMVVLYQKILKGNAHIPKWLSQGAQDLLRKILDPNPITRVDVDGIRAHDWFKQGYAPSAPFNDDEEDINVDEEDSLNMTEQNGIQDKIAINQINAFQLIGMSSCLDLSGFFEKEDASERKIRFASNYPPAYLFEKIESIVRKMGFQVHKSNGKLKVIQDCKGLANLRGKESLLISAEVFEINESLYVVELKKSSGDCSLYRKLCETLSEDLGTCKSQQFLKQDSIRQEIGRHNSSF

SEQ ID NO: 2801 - protein, 613 aa, Zea mays
MSSPTPLRPAGGGSYYPLHRRRGRPGPGPGAGLRRPRVRRCKMKLMYFLMDRDEQREKRLELEFEVSELETVLEKEQQLGRVLQCSLQGRVVCHCCLSALVPTNVRGLLAELAVVEDEIFYLEKKVDDLRLRLRREQKWTDHCILHHQQQQQQHNRQQRHSVSVSRRELQLQQAGAQQLPRLPCPGPGSDEAPERESKASVGSASAKGDETEHVVGRRSSHCHSSSSSSENPYRPTPPERKTYCMASSPNRLSEELVRLTVTIFHKLNKTATATAADAGELDLELEPSGGGASSSKLNISCIGPRSLVPRVSASVNGAAAAMSPLKSRRAAAKGGGAETGSAAGCQRRFVEFTRGSVDVSRISLCLVDIKNLRGLMQKLCAVDPSLMTNKQKLAFWINVYNFCVMHAFLQHGLPPSPEKLLALLNQASVNVGGTVLNVVSIEHLILRHSPDAKQGMYVDDDKGIMGDDGQTDLLHSYGLGYPEPNVVFALCRGSRSSPALRVYTAEDVSNELERAKVEYLESSVRVAGRKQRAVVVPKLLHWHMRDFADDAASLLEWVHSQLPRASGPLRRAIREVLGANMGSGSRAPTPAPAAKMLEVEPYDADFCYLLPVW

SEQ ID NO: 2802 - protein, 659 aa, Zea mays
MCTENYDACYPDQPVVDRYLPVWAKLPAFAAKPAFVWADDDAASTRTALTYAQLDATAACMARNLLAGTGTGSLRRGDAVLVLASPGLRLVKLLFACQRAGLTAVPVVPPDDPATLSGPAHAHLLRAVSQARPAAAVADAGYIDAVAKAVASSVAGGENARLAAMLGSLRWLAVDELERVCDGPQTPYVGCGPDDVYLIQYTSGATGVPRPVVVTAGSAAHNVRAARKAYDLHPGSVVVSWLPQYHDCGLMFLLLTVVAGATCVLAAPGAFVRRPDLWLELVSEFGATCTPVPSFALPLVLRRGQRRRPLQLGSLRNLILINEPIYESRVGEFVEAFRCHGLRAASVSPSYGLAENCTFVSTAWRPSACSESDRLPSYMKLLPSARLSPAAANEVPAEIEIAVVDEGTGEPVEDGVEGEIWVSSPSNASGYLGHPSASREVFCARVPGRTGACFVRTGDRGVVRGAERYLYVVGRSADVLALDAGRRHVHTHYVETAAFGSASGRLRGGCVAAFATSSSTPWSRSQIGVVAVVAELQKGSAGVGDHRGLCDGIRAAVWREEGVRVGLVALVDGGVVPKTTSGKLRRGAAREMLAAGKLSLVFETRYDDCDGSVAGVRGEEEETAAKSGASWLEGEGGETGMATEAFGSASRRLRLQSFL

SEQ ID NO: 2803 - protein, 82 aa, Zea mays
MCISCCSSDLNTIRSYLSRKQLAGIVMGRIYSDHESIMKHTHTASNAQLKEEIHISNEIVLHEPNSGSKSGVKTNQSKTDEY

SEQ ID NO: 2804 - protein, 254 aa, Zea mays
MADRRRHGHGQRVAVWCASRVSARASFSDSPILYPFQELTAQHHALIDSSAGCGGGEYHEPGGVAAHGVWEDGARPKPRGTGAGGSGRTLSNSSPMVLLHHRRPPEMWDLGVGVAANSKSFTTTVGLVGALACLGSTVDAGAAREVVGEGEDDEVSGGEKHAGEEEVGDVPGYLTGLSSACEGWEGGATFGVRMASAAPVDVGRAGIRARLGASEWWRGRQERAVGAGNLDGLVARRVRVRVVAKKARACSRRR

SEQ ID NO: 2805 - protein, 171 aa, Zea mays
MMLPTATATAVFLTAAPSSFSTRRRRSRAIFASLSPSFSSSEEPLLVRAARGEDGLPRPPAWMMRQAGRYMAEYQALAKRHPSFRERSENTDLIVEITLQPWRAFAPDGVILFSDILTPLPAIGVPFDISDSKGPVIQSPVRSKEQVRELVPIDLDMLQFVGESLKILRNE

SEQ ID NO: 2806 - protein, 156 aa, Zea mays
MSPASAADLAPPPPPPADLALAHNRVPSHARWNAPPTTTAQHHPGHGAPRGASTKRGSAEAAEGSGEKEMSSAGEEEKESDAEMRSDESRTDSSGAAHRRSPPPSPSPIGHVVADGLRVEQRGGRPRPGRGEGRLGVPGAVRGGVLGGVELGAAAS

SEQ ID NO: 2807 - protein, 311 aa, Zea mays
MQILRLLAARRFRRRRRRPVSTITATATAPVTPRGGAAGGCMYGYGEEEDEGPFFDLDLTCCSAPASSAGSQAAESGSESEDTSSCGAAADGGAAARSDLDFVISLHRSRPSSPSYEERLFCRGAAPARPPPLMFCASEPSDAASRSRARDSSGGGRLRLRTLSFGSAKAAFSGGRASFSRSTSGARSARLFAAYDQDLPDEGRALRPPSGDVIRRYLSKISSRLRRVGVGVGVSHPAAATDLRLRKSRSASAAQASSTAQSPPPRRDDSLAEKQDGIASAIAHCKESLHRASVSEAVDTSLARSRSDPGP

SEQ ID NO: 2808 - protein, 598 aa, Zea mays
MEIMHRGWNYALAGGRNLFSNSTIAERDLSNSSLQGFLAPEIGSLRSLQTLVLDRNTFMGSIPKGIGMLQNLIELNLSSNQLAGPIPSEIGDMAKITKIDLHANRLDGTIPPELGKLGSLLELRLSNNCLTGIVPASNDSDVESASTSDQTGLCQLSQLTNIDLSYNFLVGDVPACLQQIQRSSLVGNCFQNNTSNRPLQQCETNQDRGKDNDADENVQKGLPEPLWLLILEVIAAVSLLCFLTLCTMTGLRRCRARSSGSETSVPWTRAVSWKENTVISIDDDLLVNVPKISRQELAEACEDFSNIIGSSQETVVYKGTLKDGREIAVVSLSVPVHYWNDYVELHFHKEVIEMSRPSHENVAKMVGYCKESDPFSRMLVFQYPPNGTLYEHLHDGDGWQLSWPRRMKLALAISRALRYLHTELQPPFAVAALTSSSVYLTEDFSPKIIDFERWRYLATKPGFGSLNGGSVNSVTDSRHKRFMDVQANTYAFGVILLELVSGRASVSKDTGGLVDWARKHLEHPEEFGKLVDPRLQSVNQESLGIVCNVVNLCIDLEPSRRPSMSMIAAILEEGIEASAATLLRNSSLAWAEAELAIS

SEQ ID NO: 2809 - protein, 32 aa, Zea mays
MVCVPPMLTRFGAVTFQIPMVWCFILHLAFVS

SEQ ID NO: 2810 - protein, 558 aa, Zea mays
MDSARSWFTKLQTREKSIGKKKELPPNGKEPGDDAPSSATKQRVAAAKQYIEKHYKEQMKHLQDRKERRCSLEKKLADADVSEEEVNNILKQFEKKETEYMRLQRHKMSVEDFELLTMIGKGAFGEVRVCREKTTGNVYAMKKLKKSEMLRRGQVEHVRAERNLLAEVDHHCIVKLYCSFQDSEYLYLIMEYLPGGDMMTLLMRKDTLTEDEARFYVGETVLAIESIHRHNYIHRDIKPDNLLLDKHGHLRLSDFGLCKPLDYSNFPDLNEKDVTPPTKSSAMHGDGKQQSMPKRSQQEQLEHWQKNRRTLAYSTVGTPDYIAPEVLLKKGYGMECDWWSLGSIMYEMLVGYPPFYSDEPMTTCRKIVNWRTHLKFPEEARLTADAKDLISKLLCNVDQRLGTKGAEEIKEHPWFSGLEWGKLYEIEAAYLPQVTDELDTQNFEKFEESSDGSSVQGSAKAGPWRKMLSSKDLNFVGYTYKNFELVNDHDVPGMAELKKKEKAKRPSVKSLFGADSPEGDGGRGEPQPEVDDETASAEGSARKPAEPELTRSLSSPST

SEQ ID NO: 2811 - protein, 838 aa, Zea mays
MRAGGCAVQQALAAEAAAVVRQAVALARRRGHAQVTPLHVASAMLSAAGLLRAACLRSHSHPLQCKALELCFNVALNRLPTAAASMFHPHHHAGQQHAPVLSNALVAAFKRAQAHQRRGSVDGAQGQPPQPVLAGKVDIDQLIISILDDPSVSRVMREAGFSSSQVKANVEKAVSASSSPEHQQQNTTIPPTSRAHAAISPGGAASGDAMRVLDCMASGSKRSVVVVGESAATAEVVVKAVMNRVSKGELQQRHERLKNVQFVPLSAASFQRMPREEVEAKAADLRALVRQGCAAGKGVVLVLEDLAYAAEAWAAVSETRRRSSGSGGRDHGQGCYCPVEHAVMEVGSLVSAAAGGGGRGLDRFWLLGFGNNQAYLKSRAGQPSLEAVWELHPIVVPDGGLALSLRCNSDAEQARATRPWPFANGTAATGDSELITLSCAKVAATTPNVPPWLQGYQVQDTTRLASRSTSFQMQDWDPNSNGAAYHTSEITLSFSPQATNSPDASSISGSFAPSLMMSSEPWQFKLMQPCPNYGRGDPFARSSDRQQLLPRPTSPEKSYSVSNSSEGAPAAESPKFTELTAENLKILSNALENRAPRHKDVVTEIASVVLQCRSGMTRKRRRWCCQEKPSAVTWLLFQGAGNDGKKAVSKELARLVFGSYSKFTAISLSEFTHVHSDSSSGEITLKRQRSLDTGRSYVQRLYDAILENPHRVIMIDGVEQLDYESEIGIRNAITNGRIRGCNGDEISLGDTIIVLNCEALRSMSNASSPRLKQRVIEKDGKEGNDMNMENGMESSGFTLDLNACAEDCEGNYEESVSDNARIVNIVDGVFFFQLMEHS

SEQ ID NO: 2812 - protein, 113 aa, Zea mays
MRNKRTGRRISSETARGKRTKPSPSPEHDSSAALWFGGIREFSWGSSEGKEAKRAGGRNDTRRVGGDRESGRNFQGERRVEQSEKTLLHNNRRIRGSQSLKRKLLHRIRRTLS

SEQ ID NO: 2813 - protein, 601 aa, Zea mays
MALQGKKLINNPDDVVTEFIEGLVETYPGLQYLDGFPQIKVVLRADVERGSYDKVAVISGGGSGHEPSHAGFVGPGMLTAAVSGDVFASPPVDSILAAIRAVTGPMGCLLIVKNYTGDRLNFGLAAEQAKSEGYKMEMVIVGDDCALPPPRGIAGRRGLAGTILVHKVAGAAADAGLSLAEVAAEAKHASEVVGTMGVALSVCTLPGQITSDRLGPRQMELGLGIHGEPGVAVVELQPVDVVVEHVLKQILSQETQYLPVTRGCNAVLLVNGLGATPIMELMIAARKAVPELQLVYGIAVDRVYTGTLMTSLDMAGLSITIMKSGESILKRLDAPTKAPAWPVGSEGNRPPAKFPVPLPPSPSMKDDEILAPSQELSKQGCILEAVIEASATEIINLMDSLNEWDSKVGDGDCGSTMYRGATAILEDMKKRAFFLYSSYPMNDAAGTINEIGATIRRVMGGTSGILYAILCKAAYASLKQSSTVTANKWADALEASIAAVSKYGGASAGYRTMLDALIPASAVLKQRLEAGDDPVTAFIASSEAASAGAESTKQMQAKAGRSSYIAPDLLASIPDPGAMAAAAWYRAAALAVKNKVHGSKS

SEQ ID NO: 2814 - protein, 490 aa, Zea mays
MVLSKAVSESDMSVHSTFASRYVRSSLPRYRMPENSIPKEAAYQIINDELMLDGNPRLNLASFVTTWMEPECDKLIMAAINKNYVDMDEYPVTTELQNRCVNMIAHLFNAPLGESETAVGVGTVGSSEAIMLAGLAFKRRWQNKRRAEGKPFDKPNIVTGANVQVCWEKFARYFEVELREVKLRDGYYVMDPEKAVEMVDENTICVAAILGSTLNGEFEDVKLLNDLLQAKNRETRWETPIHVDAASGGFIAPFLYPDLEWDFRLPLVKSINVSGHKYGLVYAGIGWCIWRSKEDLPEELIFHINYLGADQPTFTLNFSKGSSQVIAQYYQLIRHGFEGYRNIMENCHENAMVLKEGLEKTGRFDIVSKDEGVPLVAFSLKDRSRHDEFEISDMLRRFGWIVPAYTMPPDAQHVTVLRVVIREEFSRTLAERLVLDIEKVMYQLDALPSRLPPPPPAAPLLRKKTELETQRSVTEAWKKFVLAKKTNGVC

SEQ ID NO: 2815 - protein, 459 aa, Zea mays
MPQYQELPCGGQVLDIDTALKDGILGGALEPEDAAAGDAGKQPVELRKMMDELDAAGDGGGDEAVPAVFICPISLEPMVDPVTLCTGQTYERANISRWLALGHRTCPTTMQELWDDALTPNATLRQLIAAWFSRRYTRFKKRSADFHGRAADLVHGLRGTAMPRRQALKGQARVAALRELRALATAHQSVTKAIAEAGGVVLLTSLLGPFTSHAVGTEAVAILVSGVPLDADTKAALMQPAKVSLVVDMLNEGAADTKINCVRLIRILMDERGFRPETVASLSLLVGVMRLIRDKRHPDGVVAGLELLNSICAVHRPARSMVVSIGAVPQLVELLPELATECVEPALDILDALSAVPEGRTALKDCPRTIPNAVRVLMRVSEACTRRALSMLWTVCRMAPEECAPAAVEAGLAAKLLLVIQSGCAPELKQKASELLKLCRLNCTDTLFISKCKLTRTIQ

SEQ ID NO: 2816 - protein, 292 aa, Zea mays
MAQEDVHLDDAGLALGLSLGSGSGGASGAARHGGISRRLSREVRLPSPHPLEPSLTLSLPDEATATGSGGGGAAHSVSSLSVAGVKRERVDDAEGERASSTAALPRACAGAEDDDDDGSTRKKLRLTKEQSALLEDRFKEHSTLNPKQKVALAKQLKLRPRQVEVWFQNRRARTKLKQTEVDCELLKRCCESLTEENRRLQRELQELRALKFAPHPQAPPSSATQAGAAAGVVPAPPPPLYMQMQMPAAATLSLCPSCDRLAGPGAAAKAEPRPKAAATHHFFNPFTHSAAC

SEQ ID NO: 2817 - protein, 56 aa, Zea mays
MLMHGVCVDFCRKQHKCRTKAPYIPCNHNKGRKLSTNLNAHASNPASLIIIGLEAT

SEQ ID NO: 2818 - protein, 139 aa, Zea mays
MARTSSGPSSSSELSVAPSPAIFPFLPSTSVALSTPATGPAAASALFSHGRAGAPNSRDAWFLSLATTPSCSLYPCFFSGRRAPSPQVAFSSCAGHCDLAASRPGLPWLPPWRTSRSSRDASSRSHVNLLCVTPSACST

SEQ ID NO: 2819 - protein, 315 aa, Zea mays
MRACWFGFLSRNDARSATMTRGAGFDGIATGTAQIDGEARHGDVGVARIDDAAALDAEGIRGCCCRLAAALCRARRGRDAKEIHVAARTGVAAAARGTPGRQPWKSWTRRGQITECPAQLEKAICGEGARRPEKKQGQREHDGVVARERNQASRLLGAPARPWEKRALAAAGPVAGVLSATEVEGRKGKNCRGRRHGEFTARARTRGGPRHGWSRGVCSAYSHHGWALVKPRHAPARAGHFQSPRGVFLAADKCTGTMACGLASRAGAWREGARRGKSREGGAHVWVPREKSAMEADVEVEAGTSGSGMGERAPS

SEQ ID NO: 2820 - protein, 107 aa, Zea mays
MSNGGNRSRGGARFELQLHLSPPPPARRVEVDGGGDGSDSSSSPSSCVSSDGSPGSKSPMVIGACTRCMMYCMVAKKDFPTCINCKQPCLVDLLHCSGAGGSGGKAK

SEQ ID NO: 2821 - protein, 761 aa, Zea mays
MGCITQLQPKQLTDCRGPGRPGRERRAGAASTTPVRLPLSLHSPLSPSACARVAASVPVRPPPFPSPIPATPHPAPGARARSGPRVYSPPPAPLLPNRRRRGCRHSGCFRSRSRGGRRQAMARRVRPSHLVLALAAAYLLLISLKFRRVLDLAATDLADDPAAAAAAAFSSPSSADHLPPPGSASATSSSSSPPFPVRPFWHRYDRVSLPDLASRNRSALDRMADDAWALGLTAWEDAAAFAGDPWALLAAATSRASDAAKCPSAVSQRARGRVVFLPCGLAAGSSITVVGTPRASHREYVPQLARMRQGDGTVMVSQFMVELQGLRAVDGEDPPRILHLNPRLRGDWSQHPILEHNTCYRMQWGAAQRCDGTPPDDNDDKVDGFPKCEKWIRNDIVDTKESKTTSWLKRFIGRAKKPAMTWPFPFVEERLFVLTIQAGVEGFHIYVGGRHVTSFPYRPGFTLEDATGLFVKGDVDIHSVYATALPSSHPSFSLQQVLEMSEKWRSRPLPKGPVSLFIGILSASNHFAERMAVRKTWMQAPEIKSSEAVARFFVALNSRKEVNVMLKKEAEYFGDIVILPFIDRYELVVLKTIAICEYGVQNLTAANIMKCDDDTFVRVDVVLRRIKLNNGDKPLYMGNLNLLHRPLRTGKWAVTDEEWPEDIYPPYANGPGYVISGDIAKFIVSQHANQSLRLFKMEDVSMGLWVEKFNSTNPVQYSHSWKFCQYGCLENYYTAHYQSPRQMLCLWDKLVRGQASCCNYR

SEQ ID NO: 2822 - protein, 308 aa, Zea mays
MAKLWTLLLAAVVVLSLLVSPIACTRKLNKPKPKPGSYRRPVKPKPKPVTGSYKPAPVAARRNHTATPTPSPTVYGPGGWLSGAGATYYGATNGDGSDGGACGYQTAVGKKPFDSMIAAGSTPLYRGGEGCGACYEVKCTTNAACSGQPVTIVITDQSPGGLFPGEVEHFDMSGTAMGAMARPGMADKLRAGGVLRILYRRVPCKYTGVNIAFKVDQGANPYYFDVLIEFEDDDGDLSAVDLMEAGSGVWTPMAHNWGATWRLNNGRKLKAPFGLRLTSDSRRVLVANNAIPAAWKPGKTYRSLVNYP

SEQ ID NO: 2823 - protein, 67 aa, Zea mays
MSLLILIFSVLVPSLPFLSPGHAYIIIIIIISSSSSSLTCSLHPYQAKPDMVRPSQASDRSFIIIIR

SEQ ID NO: 2824 - protein, 199 aa, Zea mays
MLPGVELARRRRVHYHGDVASAAGTGEHVHHHYAHAPAPAAGPALAARIRLEEKLRGAALPSTAPSRWSRLMRDGRSARGNNSPRSSRRYEQDAVASGTEPWRPPAPADPTAALLQVASATVPASASTRRRRAELTRTLSKVDVCAVCLDEVRERCQRVTRLPCSHKYHSECVLPWLAIHPDCPCCRALVPSLDTLVQV

SEQ ID NO: 2825 - protein, 316 aa, Zea mays
MEEPWRVEMVFINPLLLPPQGFRNPPPQHLRSGLLSLSNSFVCRCAAHSSSASSALKNLVTGRDREPSSSRNGERADIYSYDDDDDGQAARQAMRHGGHEDGHAQARRDLPAAGSRAAPPVPHTEGADERPNNDPIRRRAAAADDRRPAQQAAAPGAGPAAASRRVHRQRRRGVGRRRRGAGADAGRRRALRSRRRPAQEQQAPEAISRAAAARQQRRRRRRRRLLAVRVRLLRRERPVVAAAFVGRVLLRRRAGGGGVPEGRCVRPWRRRRRRDEAAARAVAGAVPAVPQPEDDMSEAAGLQRAARRRPCRCPCR

SEQ ID NO: 2826 - protein, 137 aa, Zea mays
MEAQDDCKWRQIPAFGDWNVWDGDMPVTQYFQAGAFFFAAPAEKGDADLFKVPQLPAKPYGYKKCVVRVKGEKETAVPPAARKGRRRRCVSEQHKWKPKGAVDEDLYKISPQLLCKVKKKKLLRNLLGGCLGLGCIA

SEQ ID NO: 2827 - protein, 382 aa, Zea mays
MGSLMSCLSDPIPSGNRSPPPQPKRRSSTSSRGRGGGGRDSAKASVSIDEEALTAAAALVLGQRGASGGLGAFERSASVRYAAKRQSQGPPLPRSCSTRPRSLADPELQPQQLLAKDLNTKDLETNVIVLVHGGGFGAWCWYKTISLLEDSGFKVNAIDLTGSGIHHYDTNKISSLSEYAEPLTSYLKGLGDAEKVILVAHDLGGACVSYAMEMFPSRVAKAVFLCAAMLANGNSALDMFQKQMDTNGTLQKAQEFVYSNGKDRPPTAINIDRASLRDLLFNQSPSKDVSLASVSMRPIPFAPVLEKLVLTAENYGSVRRFYVETTEDNTIPLPLQQSMCGANPPEKVLRLKGADHAPFFSKPQALHKTLVEIATMPHVRAS

SEQ ID NO: 2828 - protein, 795 aa, Zea mays
MRRWWPAALLGCAVAVSVLVAAVECAVTYDKKAVLIDGQRRILFSGSIHYPRSTPDMWEGLIQKAKDGGLDVIQTYVFWNGHEPTPGNYYFEERYDLVRFIKTVQKAGLFVHLRIGPYICGEWNFGGFPVWLKYVPGISFRTDNEPFKTAMQGFTEKIVGMMKSENLFASQGGPIILSQIENEYGPEGREFGAAGQAYINWAAKMAVGLGTGVPWVMCKEEDAPDPVINACNGFYCDAFSPNKPYKPTMWTEAWSGWFTEFGGTIRQRPVEDLAFAVARFVQKGGSFINYYMYHGGTNFGRTAGGPFITTSYDYDAPIDEYGLVREPKHSHLKELHRAVKLCEQALVSVDPAITTLGTMQEARVFQSPSGCAAFLANYNSNSYAKVVFNNEQYSLPPWSISILPDCKNVVFNSATVGVQTSQMQMWGDGASSMTWERYDEEVDSLAAAPLLTTTGLLEQLNVTRDSSDYLWYITSVDISSSENFLQGGGKPLSLSVQSAGHALHVFVNGQLQGSAYGTREDRRIKYNGNASLRAGTNKIALLSVACGLPNVGVHYETWNTGVGGPVVLHGLDEGSRDLTWQTWSYQVGLKGEQMNLNSIEGSSSVEWMQGSLIAQNQQPLAWYRAYFETPSGDEPLALDMGSMGKGQIWINGQSIGRYWTAYADGDCKECSYTGTFRAPKCQSGCGQPTQRWYHVPKSWLQPTRNLLVVFEELGGDSSKIALVKRSVSSVCADVSEDHPNIKNWQIESYGEREYHRAQSALKMCTWAVHFRNQIRKLWDTYGNLWRFPARRLPLS

SEQ ID NO: 2829 - protein, 283 aa, Zea mays
MEVKTVKVSNLSLNALKREITEFFSFSGDIEYVEMQSESEWSQLAYVTFKDSQGADTAVLLSGATIVDRAVIITPAENYQLPPEAHKQLSGANVSTESAVRKAEDVVSSMLAKGFVLSKDALNLARSFDERHNILSNATATVASLDRQYGLSEKISLGRAIVGSKVKEVDERYQVSELTKSALAAAEQKASVAGSAILSNQYVSAGASWLTSAFDMVTKAAGDMTSMAKDKVERAEEERKAIMWEERSGLVSEYAKIHLDEPSSWEPAVLPLESVDEQKLQAV

SEQ ID NO: 2830 - protein, 686 aa, Zea mays
MSSRNRSAAASSAAPALRTPRRLKRRPVKASAPGPGSGRRSGPATPLLKWDVGGGGGRGEGRKAGADEAGDAARARETKAKATEVSVRRLAAGVWRLRPPEAVAGGGSGVRVGVEHIPRHLQVQLLKQNTSGHHQSSKNEVSSPISVLERKSGELHKGQLHATSAMLPVATMEKATKWEPGDIKGMESHDAYLIASQLNLLDEHRDTAYVADLQMELQQARDRISAMETERRSAKKRLDHLFKKLAEEKAAWRNREHEKVRAILEDMKADLDHEKKNRRRLEMINMKLVNELKEAKMSAKQLLQEYETERKARELTEEVCNELAREVDEDKAEIEALKRDSQRLREEVDEERKMLQMAEVWREERVQMKLVDAKLTLDAKYTQLSKLQQDVEAFIAACSTANGDVTVVEQAESIIQAIKSVRAQDAEFRYEPPAASEDIFSIFEELRPSEEPVIKEIEPCYKNSSAKCEPEIQEVSPMTDIFLEKKAKANSNKSPKDESDTEDGSSWETISHEDVQGSSGSPDGSEPSVSNKVCDGSIPWKSRNGFERMESEKLKDESADACLTNMNQPKKKESAISKLWKSSRPKNSEICKKDAVETVNARSSNVRLSVGTYSTVESGIQEIGLSPPCVEQWSSPDSMNVQFNRGFKGCIEYPRMSQKHSLKAKLMEARLESHKVQLRQVLKQKI

SEQ ID NO: 2831 - protein, 288 aa, Zea mays
MAIPVARVHLAVAHAALPALVPTPPKCEMLPLLPTPCVAVVLPKPLAKPSRADSDERWDARKTMTGLAASTDQSSTSSSPRSTAGSVWSSARRRGSASRKIATTPPKPGRADSDERWDVRKTMTGLAASTDQSSASSTSSPRSTADSVWSSAQRRGSSCKSATALPPKPGRADSAVRWDAHKKTAIPASSSSSSSSGTSSHVSSGKWTMSRASSSAERWDVHKKYRPPQAAVALDDGESSTASSNDIDTDKEEIVWKPRAIYAEPCFISAAPAPSMLPMPTAFLLRVA

SEQ ID NO: 2832 - protein, 173 aa, Zea mays
MAIPVARVHLAVAHAALPALVPTPPKCEMLPLLPTPCVAVVLPKPLAKPSRADSDERWDARKTMTGLAASTDQSSTSSSPRSTAGSVWSSARRRGSASRKIATTPPKPGRADSDERWDVRKTMTGLAASTDQSSASSTSSPRSTADSVWSSAQRRGSSCKSATAPRAPQARPS

SEQ ID NO: 2833 - protein, 140 aa, Zea mays
MERSLTFTTVDGVAQSEEGDDMETVRILIDRVRILIDRVRSFIDVDLQVMLARARAGEGPHDGVPPRPTRQSPGWRSVSSTPTVEAERDGNRGCAICLDDFVDGVEVAVVPCSGGHQFHPGCIASWLGRSNTCPLCRHAL

SEQ ID NO: 2834 - protein, 392 aa, Zea mays
MNLNDDLRQLSIGSVTAKSYGRYDVNGYRFRSSIFESSHPMAATQNSGVVTRATDMEGHEACYYGKIKNIIEITFAGNKPLALVFFECKWYDPKYYRTEFGMTQIQPEKLLQGHDTMPPKSKKSVKGLFKGLGLFQGSSSSSSRRRELLSVVHGDEDEQHTEEQHIEEEEHNEAEQHNEEVEHNEEVDHVTWDQAAQHHQPWDQWDHQREQQQAWDQWGQQGEPADNPMDDGSGGSSATRTRRSRKSHSVKPRHAIEREADRTLIMPHGDRTWDEYKFKKERNHTDRQGLVRNDFWLRYRLPDGEDYMGHAERVLQNNAKKLVKDAIYYARIQATNLYFQKHPEEAGPLNKKEGSSKIYLTEDQYREVMVPWMAPVPDAYYAWCRYWASEGF

SEQ ID NO: 2835 - protein, 72 aa, Zea mays
MEVKVVVSLKVPATGRRGMRSRKPRVDVDVVPRSSTKRRAREPTFTTTKAVKCGIGTSAGATSCSHAWLDTA

SEQ ID NO: 2836 - protein, 458 aa, Zea mays
MVATSEAAPLRVSASVGSKHHGGAGTRGPATRRRARDVVVFAAGVAATLLALVGTASVLDPGGRGGLVALRVPVPVPGPEDGPRTFYDDPEVSYAVAAGRRLTGWDAKRAEWLRSRGLGRRSAPERVVMVSGSQPEPCPGGAGDHLMLRFLKNKLDYCRLHGIELLYNREFLHPAMGGYWAKIPIVRAAMLAHPDAEWVWWVDSDAVFTDMDFSLPLAKYGGRNFVVYGWPDKFFVRKSWLGLNAGVFLIRNCQWSLDFMDEWARMGPAYPEDHARWGEVLRATLSDKDSDVACDQSALVYLLLNNWERPGKKTFVETEYFFQGYWKEVVDRLDGVAARYEAVERRSPGLRRRHAEQEHLRYAGARNAALRGVVPGPAGGGEVGWRRPLITHFVGCQPCSGGRNPMYSRESCDDGMRHALGFADDQVLRAYGFRHAAPLNDSVRGLPFDYPAAHARND

SEQ ID NO: 2837 - protein, 479 aa, Zea mays
MAASESVPFCVKGGGGGGGGAPRPHGHLVLPAGRVREGLAFAAGAVVAALVLLSSASVLAPPPVPNIVSLPLSSSSPANANAKAAISSSPAVAVGEGPRTFYDDRELSYAVGGRRVTGWDAKRAAWLRTRGLDGAAVAGRVVMVTGSQPEPCKGPGGDHALLRFLKNKLDYCRLHGIELLYNTALLEPSMVAYWAKIPSVRAAMLAHPDAEWVWWVDADAVFTDMDFSLPLERYRESSLVVYGWEREVYEERSWVGLNAGVFLIRNCQWSLDLMDAWARMGPASPEYARWGKTLREELEGKPNDESDDQSALVYLLSRHLERERWANATFLESGYYFQGYWAEIVDRLDGVATRYEAVERGRAGGRAGLRRRHAEREHLLYAAARRQAVRQQRGTGGGVPGPDGGGQKGWRRPFVTHFTGCQPCGGAPNRMYTRRRCAEGIRRALAFADDQVLRSYGFRHAAPLSDSVTPLPFDYPAAH

SEQ ID NO: 2838 - protein, 553 aa, Zea mays
MEDNGAAAAAAAPATSMPAEKRVAVIQGDAPPEPAAGLLPCGPRKTGLHLFVMNIRSVFKLDGLGSEVLRIAVPASLALAADPLASLVDTAFIGRLGSVEIAAVGVSIAIFNQVSKVCIYPLVSVTTSFVAEEDAIISKAVRGNSSQEEDVEKASHVGFDPETSNLHASGPAGMAECVNSCIPTECAADPSGRQGRCEKRYVPSVTSALIVGSILGLLQAVFLVLSARFVLNIMGVKSGSPMQGPAVRYLTIRSLGAPAVLLSLAMQGVFRGFKDTKTPLYATVVGDAANIILDPILMFVCHMGVTGAAIAHVVSQYMITLILLCRLVQRVHVIPPSIKSLKFGRFLGCGFLLLARVVAVTFCVTLAASLAARHGPTVMAGFQICCQLWLATSLLADGLAVAGQAVLASAFAKNDSKKVAAATSRVLQLSIVLGMGLTVVLGLAMRFGAGIFTSDVPVIQVIHRGIPFVAGTQTINSLAFVFDGINFGASDYRYSAYSMVAVASVSIPCLLYLSAHNGFIGIWIALTIYMSLRTIASTWRMGAARGPWTFLRN

SEQ ID NO: 2839 - protein, 215 aa, Zea mays
MVMAPQPSRALSPRLSRAPGAGHASCRCSAALAPLFGKRPAPLVVSFPRAGSGGAVASCSAVPVQESSTSTAVSKKKDGANKEATAAKPKKAAALPLPEMMQEEIIPPLKAALEAEEDVSQVQLAFENNTLEGSFIKDDVPYCFWAFFPKGDLTGPKGFALSSYSNEVSTIEPFLIDEKRVTAKYVVFWVYKRLAGQGILPVWKEEEGEDHQDAK

SEQ ID NO: 2840 - protein, 1627 aa, Zea mays
MESVLTSHPLTQSFPPSSDAPSHLSPSPAFSPNSASTPTFSQASEPSHSGVSSQVGRSKFQRWSDGGGGPFSGEPGSYKDATLIQLSAVPSSPSRGSQLRSAKEVVVRGHVEDLRQAVSGRRQVGLVRHSLPPSPRRQEVDGWQTVERRRGRRFEQAPRRPVDLRGKCFNCLSSNHFVAVCRRPTRCFRCRLLGHQARRCPSLLPVEKGTSGKPPRVQGGRVQVWQRLGPPVPSSVLNHRMSVWQRIGPQLPPSKFSHSPAAEASLVESNISSHSGKKKRRRAKRHKEVSWQSTVPVGAASTLEPSPGVGTQSSVKTCMLEFSTAMAREEAALRRALFVSIVGSRPEISGAEVRDEVARAFGIDVNSISIHQSLPEDFLLLLPDESSADRVFSGGKLFRGPLFNLQFRRWSRLAHAEAARLPALVEVEVHGIPAHAWDRSTVEYLLRDSCIITDIHPSTSLKNDLSSFRLRAWCLNTDLFPRPMKLLIVEPGTDVQEKRCLSYDIEVAVTAVMVPTNFDPPPAHSPAADGRDRHEDGGGRHSDDSNSPRPDGGRLQRPIFQRLGPRGQSTSGGRGAAVQRCALSAAGPAAGIEVVASPTRLLDGSPLSLTIGAGAEEDLAAGIAEVRRLHCPLPLLLVAAGVEEVPPPVRRLAVNSVAGVEEVASSMGRAVHSPSWLAAGTGTEAHSGRMLAADIGTEAHSGGMLAVSSGAVAHTGSMVAVPAREVLAVQMELTAADMGTGPGTVCAKVGPVGCAVDAPVVQQPQMDGHGGPMWTRLAGSLKSLGSGSPRQRFVGLQRLTKTVSPRNSFNVGIELVPRLTSTQSLVGTSEADRNSPAGMSLDAQVLESPRLKVYSRLKKGRLQIPAPVSSQMEVSAPVLDLVPAGVSSQLEEATPVMKLVANITRDIDCLLPQPPIQKRRTKQLPPDFVPRRSSRLSKKREGLNSTVRQVQAELMLKLNVTNSQVAVTDEMLEEFGQLFDKPLSNSHIKALAALFGWSVPDNVQECLDVPLLRELSIETEIVRMFHPPIRKSEEAIATIAPRYTHSVRVLDERFIRILKIFKWGPDAEKALEVLMLRVDHWLVREVMKTDVGVNVKMQFFRWAAKRRNYEHDTSTYMALIHCLEVVEQYGEMWKMIQEMVRNPICVVTPTELSDVVRMLGNAKMVRQAITIFYQIKTRKCQPIAQAYNSMIIMLMHEGQYEKVHQLYNEMSTEGHCFPDTVTYSALISAFCKLGRRDSAIQLLNEMKEIGMQPTTKIYTMLIALFFKFNDAHGALSLFEEMRHQYCRPDVFTYTELIRGLGKAGRIDEAYHFFCEMQREGCRPDTVFMNNMINFLGKAGRLDDAMKLFQEMETLRCIPSVVTYNTIIKALFESKSRASEVPSWFERMKESGISPSSFTYSILIDGFCKTNRMEKAMMLLEEMDEKGFPPCPAAYCSLIDALGKAKRYDLACELFQELKENCGSSSARVYAVMIKHLGKAGRLDDAINMFDEMNKLGCAPDVYAYNALMSGLARTGMLDEALSTMRRMQEHGCIPDINSYNIILNGLAKTGGPHRAMEMLSNMKQSTVRPDVVSYNTVLGALSHAGMFEEASKLMKEMNTLGFEYDLITYSSILEAIGKVDHEYTDQG

SEQ ID NO: 2841 - protein, 625 aa, Zea mays
MRKAASTATAGAGATFRRRAMEGLATVLLLYALLVLALESPLVSTSPFGGAAGGTARKLHLSFGAGERAAPARPASASVPGASAHGQDHRLSRFATGLDVRLLDSARSGALRRSIADAVAAGARAFSDLEALDPAVVAAPSGESDAARCPHSIALTAEELGARGRVVELPCGLALGSHITVAATPRAPHEERNPAIVVLRDGERHAMVSQFMVELQGLRAVDGEDPPRVLHFNPRLRGDWSGHPVIERNTCYRMSWGAVQRCDGWRSRPDEETVDGLVKCEKWIRDDDDRLEKSKTTSKTAWWLNRLIGQKEEVNFGWPFPFVEGRLFVLTLSAGLEGYHVSVDGRHVTSFPYRTGFVLEDATGLSLNGDLDVHSVIAGSLPTTHPSFVPQNYLEFSTVWQAPLLPDEPVEIFIGILSAANHFAERMGVRKTWMSVVHKSPNMVARFFVALHGRTEVNAELKKEAEFFRDIVFVPFLDNYDLVVMKTLAICEYGLANFGLARVFGIPVRTFTHEVVTLWYRAPEILLGERQYSMPVDVWVLGTPNEQSWPGVTSLPDFKSAFPKCQSQDLAAVVPNLEPAGLDLLSPIYVFIAHGQKMLRYEPSKRITARQALEHDYFKDLEMVQ

SEQ ID NO: 2842 - protein, 606 aa, Zea mays
MAAASTATAASHSASFPAASLRHDARRPSCVAPAAAAATTAAETGLTAVPAPPPTPMLRVVPESLQRDSGCLVAGFRERGAGAADGEGFGDAVGEGGGPGAMEYLTSVLSSKVYDVAIESPLQLATKLSDRLGVNLWIKREDLQPVFSFKLRGAYNMMAKLSREQLERGVICSSAGNHAQGVALSAQRLGCDAVIVMPVTTPEIKWKSVERLGATVVLEGDSYDEAQSYAKLRCQQEGRTFVPPFDHPDVITGQGTIGMEIVRQLQGPLHAIFVPVGGGGLIAGIAAYVKRVRPEVKIIGVEPSDANAMALSLCHGKRVMLEHVGGFADGVAVKAVGEETFRLCRELVDGIVMVSRDAICASIKDMFEEKRSILEPAGALALAGAEAYCKYYNLKGETVVAITSGANMNFDRLRLVTELADVGRKREAVLATFLPERQGSFKKFTELVGRMNITEFKYRYDSNAKDALVLYSVGIYTDNELGAMMDRMESAKLRTVNLTDNDLAKDHLRYFIGGRSEIKDELVYRFIFPERPGALMKFLDTFSPRWNISLFHYRAQGEAGANVLVGIQVPPAEFDEFKSHANNLGYEYMSEHNNEIYRLLLRDPKV

SEQ ID NO: 2843 - protein, 231 aa, Zea mays
MHQQQHQERPREVYRECMRNHAAKLGTYASDGCCEYTPDDGQPAPMLCAACGCHRNFHRKTFLDAAAGAHGAMLPSPAGASPGYGSGTHHTATTAAGMGGDAGAHGSGGRRRTRTKFTEEQKECMARFAERLGWRMPKREPGRAPGDDEVGRFCREIGVTRQVFKVWMHNHKSGGGSGGAGAGAGGAAQTSSSTTRGGGSGAVGGGGSMSPAICADVEDDEEVMRGSGMCM

SEQ ID NO: 2844 - protein, 1010 aa, Zea mays
MGEAVTAAELLYGMPLIRSVAGDGAGAGVETAGCGALLVELKQLWGEIGKSREERERMVRELEAECMRVYRRKVDEATGERAALHQSLAAGEAEIAALAAALGSDSGPQLKVRAVARAVSFLQVNKWTMSLTERVSSATALLEELRAVKAERSRQFADVRSEIEKITAEIAGRSYGYEGSPRASEVGEHDLTIRRLNEYRARLTSFQKEKSDRLHRVLEHVTEVHSLCDVLGEDFIAIVNEVHPGLHETSDPGKPTSISDSTLATLAQVVATLAAEKAKRATMLREAVVPLVELWELMDSSEEERRSFRNVAAVLNPDKLDALPSGVLSVATIKKTEEEVERLTRLKAGRMKELVLKRRLELESICRSMHVEPDASTVPEKSIALIDSGLVNPSELMASIDEQIAKAREELQSRREIMEKINKWLLACEEEEWLEEYNTDENRFSTGRIARLNLKRAEKARLIITKIPAVIDSLMSRTLAWESERKKPFLYDGARLVAVLEEHKQARLRQEEERRRLREQKKLRTLLSEKEAMPHLKRPGSSFGRAAEPCKVNRKRVDAGRLASSGGSGTTTSSSSSGGGGASATELIRPRSSAAGAGQCGEFFKDFLEGYSCRKYSIVIVKEYLIQRIGELIPSLLFFYSIYLSSGTGRLRFAGQGAGFRSWSGAPAVHDFASATAQSWVGRDDGGGGGEADEAQGRPDEGARAQEAAGAGEHLQEHARGARCEHRAGEIHCADRLWYQFTVPALLIDSGSDGFIFSNADEILPGLVNPSELMASIDEQIAKAREELQSRKEIMEKINKWLLACEEEEWLEEYNTDENRFSTGRIARLNLKRAEKARLIITKIPAVVDSLMSRTLAWESERKKPFLYDGARLVAVLEEHKQARLRQEEERRRLREQKKLRTLLSEKEAMPHLKRPGSSFGRAAEPCKVNRKRVDAGRLASSGGSGTTSGSSSSSGGGASATELIRPRSSAAGSGQCGEFFKGVRRLSAPPFNYVAVSKGRSMSSSLALS

SEQ ID NO: 2845 - protein, 649 aa, Zea mays
MAGKGDGPAIGIDLGTTYSCVGVWQHDRVEIIANDQGNRTTPSYVAFTDSERLVGDAAKNQVAMNPINTVFDAKRLIGRRFSDASVQSDAKLWPFKVIPGSGDKPMIGVQFRGEEKQFSAEEISSMILNKMKETAEAYLGTTIKNAVVTVPAYFNDSQRQATKDAGVISGLNVMRIINEPTAAAIAYGLDKKSSSDGEKNVLIFDLGGGTFDVSLLTIEEGIFEVKATAGDTHLGGEDFDNRLVNHFVQEFKRKNKKDITGNPRALRRLRTACERAKRTLSSTAQTTIEIDSLYEGIDFYTTITRARFEELNMDLFRKCMEPVEKCLRDAKMDKSSVHDVVLVGGSTRIPRVQQLLQDFFNGKELCKSINPDEAVAYGAAVQAAILTGEGNEKVQDLLLLDVSPLSLGLETAGGVMTVLIPRNTTIPTKKEQVFSTYSDNQPGVLIQVYEGERARTKDNNLLGKFELSGIPPAPRGVPQITVCFDMDANGILNVSAEDKTTGQKNKITITNDKGRLSKEEIEKMVQEAEKYKAEDEEHQKKVNAKNTLENYAYNMRNTIRDDKIASKLPEDDKKKIDDAVEGAINWLDNNQLAEVDEFEDKMKELEGICNPIIAKMYQGAAGPDMAGGMDQDASPAGGSGAGPKIEEVD

SEQ ID NO: 2846 - protein, 492 aa, Zea mays
MKTRSSARGEPRRLGNAALLALMLCSVVALSLIRGRFAPIVTTAGDAIKSEDDAAAAALSVSKAAVNVDTGDSADEAAAEAAAEEKEKEEVQPKPADSSGSGSGGSAAKPVCYETSRRSDTCEAAGDVRVVGSTQTVYVDSLDREWKTKPYCRKHDNFALAHVKEWSLKPLPSGAAPQCTVNSSATAFVLSTGGFTGNPFHDYTDVLIPAFITAHPLRGEVQFLVSSYKSWWMNRYIQIFQQMSRHEVVDIDADDEVRCYRSVVVGATFHRELGVDASKSPPGYSTADFRKMLRDAFGLERATATPSGDRWDIRRRPRLLIISRRPSRGRAFMNERAMADMAASLGFDVRIGEPDTSTDTSKFARLVNSCDVMVGVHGAGLTNMVFLPAGAVVVQVVPYGRLEWLARNTFAEPSAGMEVHYLEYVVQLDETTLSEQYPSDHPVLRDPMAIHKQGWNALKTTYLDKQNVRPHLGRLKNTFLQALKMLPHGRDD

SEQ ID NO: 2847 - protein, 365 aa, Zea mays
MEQEPHRPMELPPGFRFHPTDEELITHYLARKAADARFAALAVAEADLNKCEPWDLPSLARMGEKEWYFFCLKDRKYPTGLRTNRATEAGYWKATGKDRDVFRGKALVGSKKTLVFYTGRAPRGEKSGWVMHEYRLHAKLHGHGHGHGQGAAVVVVPKAAGTKNEWVLCRVFKKSLVVGGAAAAAAPTAGKRGGTETSSNSKTGDVAAISHLPPLMDVSGSGSGAAAAAAAHVTCFSDALEGQFLDQTTTTPPPEAAAAATDDDGHLGALAAASSSAFQLPGFAHYYYGGGAPHLHQHHGAASLVQLLEGSVPPCNKGGERERERERLSASQDTGLTSDVNPEISSSSGQRFDHDHDHHLCCWGY

SEQ ID NO: 2848 - protein, 454 aa, Zea mays
MAGPPPLRLKDLLELDCDSCSAAGFRCYPRRLAESAPMRHLLESSPSLRRRRRPGKLSHLSRSLSRRLSRGGGGFWRRRDVDEEEEEVADAAVATTTTTTGPPACCGSSSEEQETSSSSESSDNSSERTSRRSRSESESESDFSSATEESAHHHPSQPAAAAAAAGDEHEVAMKSASKEGSSSGSEAGDKEQQLSPVGVMDFPFDDDDEEDESRDAGVACSPSFSLARLQRRKTHKIRRLGSGGGDDELAPLDLEALLATTQDSDSDPDRPADEQMIQCRTGGAAAATPTCASRGHGHGHRRVAGVFGVPDEDDDDDGLVSLLTRTVSAGLDGVSERLLLDFFVEVTKRRRSEAHAEPCNKLPGPAAGLLRREAERLLVDGEAVAAARGWLEGTANGRWGLKDVLSGGGADIVAEMGRGRRWMQVGEEEREVVALVTGMLVDQLVGDVVRCLAV

SEQ ID NO: 2849 - protein, 591 aa, Zea mays
MLVGGGRDDEEVLRKLKSMDVDKMENGGGGGEAESPRPAVKYHGWKAMPFIIGNETFEKLGTLGTSANLLVYLTQVFHMRSVDAATLLNGLNGTTSLAPIVGAFLSDAYLGRYLALAIASIASLIGMFLLTLTAGADSLHPPECSVGETCEKATSYQFAVLFVAFAFLVLGSAGIRPCSMPFGADQFDPHTESGKRGINSFFNWYYFTFTAAMMISATVIIYVQSNVSWPIGLGIPTALMFLACVLFFMGTRLYVRVKPEGSPFTSVVQVLSAALKKRSLKQPKDPKQDLFDPPHTSAIVTQLAHTDQFRCLDKAAIVASQDELRPGGAAPADPWRLCSVQQVEEVKCLIRIVPVWSTGIIYYVAVVQQSTYVVLSALQSDRHLGGAGFQIPAASFTVFAMLAQTLWIPFYDRLLLPKLRKITGKEEGFTLLQRQGIGIALSTVAMVISAIVEDRRRAIALSQPTLGTTITGGAISAMSSLWMVPQLMILGLSEAFNLISQIEFYYKEIPEHMRSVAGALAFCNLALGNYLSGFLVTIVHRTTGSGQNWLAQDLNKGRLDLFYWTIAGIGVFNLIYFVICARWYRFKGTSN

SEQ ID NO: 2850 - protein, 330 aa, Zea mays
MGMGPLDNAASAALEAAAAAAAAPSRAGSYAVLQCGEDSEYVRQKYGGYFAVFRALLEEDGERWRVYSAVRGELPADAEAAGFDGFVISGSCADAHGDEPWILALVDLTRRVHAAGKRVLGVCFGHQILCRALGGRTGRSAKGWDIGVSCIHPTAAAARLFAPLKLPVHMPVIEFHQDEVWELPPGAEALARSDKTRVEMFRLGGRAMGVQGHPEYSKDVLMSIADRLLRHNHILVINHNSNDSVPSVRLSLCLSVCLSVCDMEKKYLSLFCLLLAGLPGGSGQDELRRAAAGQGAVEQGVQGLPQGKAPVVAAARCGAIAGGNWGALDA

SEQ ID NO: 2851 - protein, 299 aa, Zea mays
MAAMMMDSTAEKDLAGDGAAVSGHGQDLERSCHDQEPAAADGASSRGLAIGRFVRELMVEGVASFLLVFWSAVAALMQEMHGTLTFPMVCLVVALTVVFVLCWLGPAHFNPAVTVTFTVFGYLSWTKLPFYVAAQLAGSLLACLSANGVMEPRAEHFYGTVPMAGGDTRLPFLLELVASALLMVVIATAARGSNQTAGGLAIGAAVGALGLVIGPVSGGSMNPIRTLGPAIVLGRYTSVWIYLVAPVAGMLIGALCNRLVRRSDAIIAFLCGAKPRVVAPGQNRAARRWSTCVSALLAG

SEQ ID NO: 2852 - protein, 269 aa, Zea mays
MASTIMAATSRIVAAKTPFLGQGRAAANASPLRDVAAAAAGGRITMGNDLWYGPDRVKYLGPFSAQTPSYLTGEFPGDYGWDTAGLSADPEAFARNRALEVIHGRWAMLGALGCITPEVLEKWVRVDFKEPVWFKAGAQIFSEGGLDYLGNPNLVHAQSILAVLGFQVILMGLVEGFRINGLDGVGEGNNLYPGGQYFDPLGLADDPVTFAELKVKEIKNGRLAMFSMFGFFVQAIVTGKGPLENLLDHLDDPVANNAWVYATKFAPGS

SEQ ID NO: 2853 - protein, 82 aa, Zea mays
MSSSCMHGRRRSSSYLGACVSWQWEAACASRASARRRLAVGRRAIELPPAAHTMLLTRTDGGHGLSASVAAAPAPSFTSLLR

SEQ ID NO: 2854 - protein, 814 aa, Zea mays
MKSPPVMDPEAPPAGTPPDDEEEKRGGRKGVPWRMTLSLAYQSLGVVYGDLSTSPLYVYKAAFAEDIQHTESNEEILGVLSFVFWTLTLVPLLKYVCVVLRADDHGEGGTFALYSLLCRHARAALLPPGRTAAWDEDQFSDGAGGGTNKATAQNGNAVTLGGGAAASVRRLLERHKVLQRVLLVLALVGTCMVIGDGVLTPAISVFSAVSGLELSMAKEHHKYVELPIACIILVCLFALQHYGTHRVGFIFAPVVITWLLCITLIGVYNIIHWEPTVYRALSPYYMYKFLRKTQRGGWMSLGGILLCVTGSEAMFADLGHFNQLSIQIAFTCMVYPALILAYMGQAAYLCKHHIMESDYRIGFYVSVPEKIRWPIMAIGILAAVVGSQAVITGTFSMIKQCASLGCFPRVKIIHTSAKVHGQIYIPEINWIMMILCLAVTIGFRNTKHLGNASGLAIITVMLVTTCLMSLVIVLCWHKSIFLAIGFILFFGTIEALYFSAALIKFREGAWVPIVLALIFILIMCVWHYGTIKKYEFDVQSKVSINWLLGLSPNLGIVRVRGIGLIHTELETGIPAIFSHFVTNLPAFHQVLIFMCIKNVPIPHVRPEERFLVGRIGPKQYRIYRCIVRYGYQDFHKDDVEFEKELVCSVAEFIRSGSSKLNGTAEEVDEEEEQRMAVVRSNSVRMLEEEATVQNTVGVGPSSRASREIQSPSPAPATGVGPKNKKRVRFVLPAASPKPDAGAQEELQELSDAREAGMAFILGRSHVKAKSGSGFLRRLVINFCYDFLRRNSRGPRYAVTVPHASTLEVGMVYFI

SEQ ID NO: 2855 - protein, 423 aa, Zea mays
MCGGAILSGFIPPSGVPAAAAAAKKKQQRRATADLLWPGPGKKGAPREEDFEADFREFERGLGEDDDVDGAGDEVQELPLPEPARLAFAAAVGAPRTAVDGVMTPKDGEGDMPTTATNSAANKRRRKNQYRGIRRRPWGKWAAEIRDPSKGVRVWLGTYSTAEEAARAYDAEARRIRGKKAKVNFRDEAAAAAGAQKAPAATTPTACGNAARLGPPPPPPKFRADEVFGNMNGGTGSNDLFAIMFAFSDSSSKVVRVEPGEGAAGFLPADLLPGSKRSAANMLLLSDQSSDSYGSCDLGWEWDWDDDTMTSDYASVFAPAAPSNVVPAWYTQGGPVSKRTRSSYGYGAAMPGGFDPETNYQYQPLPYVVESSPSDGASTDDMDCLQMMRAGDVPQDGASSGGGGGDGGDIWSLDELLMAAGAY

SEQ ID NO: 2856 - protein, 494 aa, Zea mays
MAENNVVATYYYPTAAPAAMEVCGAELGQGKPDKCFDDDGRPKRNGTMWTASAHIITAVIGSGVLSLGWAIAQLGWVAGPVVMLLFSLVTYYTSSLLADCYRSGDPSTGKRNYTYMDAVNANLSGIKVQICGFLQYANIVGVAIGYTIAASISMLAIRRANCFHQKGHGNPCKISSTPYMIIFGVAEIFFSQIPDFDQISWLSILAAVMSFTYSSIGLGLGVVQVIANRGVQGSLTGITIGVVTPMDKVWRSLQAFGDVAFAYSYSLILIEIQDTIRAPPPSESTVMKRATVVSVAVTTLFYMLCGCMGYAAFGDGAPGNLLTGFGFYEPFWLLDVANAAIVVHLVGAYQVYCQPLFAFVEKWAAQRWPDSAYITGEVEVPLPLPASRRRCCKVNLFRATWRTAFVVATTVVSMLLPFFNDVVGFLGALGFWPLTVYFPVEMYVVQKKVPRWSSRWVCLQMLSLGCLVISIAAAAGSIAGIASDLKVYRPFKSY

SEQ ID NO: 2857 - protein, 433 aa, Zea mays
MGSRVKEDERNEKIIRGLLKLPGNRRCINCNSLGPQYVCTSFSTFICTNCSGIHREFSHRVKSVSMAKFTSQEVSALQEGGNERAKEIYFKHWDLQGPVIDSSDVHRLRNFIKNVYVERRYSDQRIGEHLAQAKKPSSSRTDDPSPATFKDAKLYMSKNLIDFDSDLEPPQGVAQTDIQKGSSPQTDVGWATFDDATSKKTTTMPSTSSTNFLEGPMLQIADLTSAPQIRFSNAKSLSFAPSNRGNQLNQQNFSPVNTTQYSNTLLNRATSAPVHSQDIFAMSYRPVSSAWNWQPNPSVNMQYGQHRTHYPVGIVNTTQLAHPYPVNPVSLAGGPASAHASTRFPSLTSMQEALPNLGSTAVLSRAPVHQYMVQQHTVQVPNYTFPSGYEGTRGIAATASTYGLPPMDQRLAAQNLQVMNHGSLPRVGGNPFA

SEQ ID NO: 2858 - protein, 696 aa, Zea mays
MGSMSQKIKIFTEDEIASITSNYSTLIGKGGFGEVYRGVLDADDDLVAVKRYIRQDLRDEFMDEVNIHSVMNHNNVVKLIGYCIGESTLMLVTEYISNGNLDDILHRSDASIPLDVRLGIAIGCAEALSYMHSMDSQSDNHIYHGDIKPANILLDNNLTTKVSDFGLSRFLFSGTTQFTTTLKGSMGYMDPVYFHEGCLSPRSDVYSFGIVLLELLTRKRAKYGDVNLIPTFNKACAKGKGLRELFDAAIAEKDNVKILKESWKLASQCLSLNIHTRPQMNEVAKRLRMLKKELKTSPQSILATHSMWAKQYRQAGSSSPSFKKKLSFFKGNASSYSKVISELGDNVRVFTKEEINEVTHNYSNLLSGGTSATEVYKGTLEDNTMVAVHRLVYEGSEEAFINGGMVVSKIAHRNIVRVLGCCLEPQTTAFLYEYVAKGSILDILCSQEDFPLDLRMRIAIKTAEALQYLHSSETGVTGHGSVSASTILLDNNLVPKLTEFSRSCTLFKESETTSVVGAGVMITGSLLEKALNDDPSRYGSVLMNLESDVYRFGGVLMALVSRDGDGDGGHDGLLARFTRAYETEETGRALFDRDVITAEEDVALLDELGRLALKCSVLDADRIAVRPTMKEVADELRTMRRSWKERSRSTEAPAAYVDVAAAGAAVVPAEAARLPNLMRHMFGYRRISVGDPIRVC

SEQ ID NO: 2859 - protein, 571 aa, Zea mays
MYIHLNLSLSLSFSVLTNPILCLHIQVGNLSVQRLGQSQVITAVNGQFPGPKIEARDGDTVVVHVVNLSPYNLSIHWHGILQRLSCWADGPNMVSQCPIRPAAGTYTYRFNVTGQEGTLWWHAHVSFLRATVYGALILHPAAPSSYPFPTPHGEATILLGEWWNVSVVDVERQALLMGAGPNNSVALTINGLIGAGGGGGSENSSSSSSSQYELAVQRGRTYLLRIINAALNYELFFKVANHSFTVVAADACYTDPYHTDVIVIAPGQTVDALMRADADPGRRYYMAAQVYQSLANATYSAATTALLTYLPDASGSDDEQPTLMPTMPAFNDSATAQSFYASLTGLLQDGVPLHVDTRMLVTFGLGATPCASAQTLCNRTLGSVAASMNNVSFQLPTTMSLLEAHMRGAPDGVYTRDFPDRPPVMFDFTGDAMAANRSFMLTSKGTKVKTLRYNETVEVVLQNTAVLGAENHPLHLHGFNFFVLAQGPGNFNAHRHVRKYNLVNPQQRNTVAVPGGGWAVIRFTADNPGVWIMHCHLDAHLPFGLAMAFEVEDGPTPDAVLPPPPPDYPRC

SEQ ID NO: 2860 - protein, 639 aa, Zea mays
MATYYSSPDSERDSQTMYSTESGNASYPVPSALGNFLYLNSASSGPYTEFNGIVQSQQNFMELTGHPSAISHDSSSNEATNIGTSLTEQRSFGPLKDMRNEMLMHLMDGAHSSGSDLIHNDDHSTAQLEFGMLNNHNSTSLPSASGQGLSLSLNTHILAPSYPYWSAKQDLLTPNSYQGDDNRMKNMQSEASQAIRNSKYLKAAQELLDEIVSVWKSVKQKTDKGPSEAGKSDGKETDGGTKSEGVSFDPQESGANTAAELSTAEKQELQNKMVKLMAMLDEVDRKYKHYYHRMQLVMSSFDMVAGSGAAKPYTAVALQTISRHFRCLKDAINDQISVIRKKLGEDDDASGKEGKLIRLRYIDQQIRQQRAFQQYGMLQQNAWRPQRGLPENSVSILRAWLFEHFLHPYPKDSEKLMLSRQTGLTRSQISNWFINARVRLWKPMIEDMYKEEIGEAELDSNSSSDNVQPNKDKPPSSEEKDHKTSTSQVCQTSQLGESKANIGGVVSFCGAPAGGFHNDANPDDSFMSLMLKAQRPGETDGSGLLHDAVAHHSDESARFMAYHLTEFGRYGNNNVSLTLGLQHAENTQPGFPGVRDQDIYNSTAPLNVTSTSSEYDSASQIDQQRQLFEVSPLMHDFVA

SEQ ID NO: 2861 - protein, 250 aa, Zea mays
MADHKYCERHINRNRHRSRKPVENQPKKTTKEVPAAAGSLPCAGPQGSLKKAKVNDSKPGTVSYWADSLNRTMLSREKANKPTEDSSLLLTSTNSQPTLSLLSQLKQQNKPDKLGPTLENESNPDTILKAWGGNQPSHKSISSTERHDAESLQSVLQNFSLAQNEKMESEKNKYSDSVLVSSTFYSADGPRATCLTPNMTQVKQDCISSSWEMPQGGPLGEILTNSKNSKDLSKCKPRSYGWLLNLDHAP

SEQ ID NO: 2862 - protein, 769 aa, Zea mays
MAAEAPVRAPATARSSRRPAAAVVSASRLLLGHRPFLAPRFAAGRAAVAGPAAGLRPRPRRPRLSVVVMASSDRQVPLHDYRNIGIMAHIDAGKTTTTERILYYTGRNYKIGEVHEGTATMDWMEQEQERGITITSAATTAFWNKHRINIIDTPGHVDFTLEVERALRVLDGAICLFDSVAGVEPQSETVWRQADKYGVPRICFVNKMDRLGANFFRTRDMIVANLGAKPLVIQLPIGSEDNFQGVVDLVRMKAIVWTGEELGAKFEYKDIPADLQEMAQDYRVQMLETIIELDDEVMEKYLEGTEPDEETVKKLIRKGAISASFVPVLCGSAFKNKGVQPLLDAVVDYLPSPLDLPSMKGTDPEDPEIIFERQPSDDEPFSGLAFKIMTDPFVGSLTFVRIYSGKLIAGSYVLNANKDKKERIGRLLEMHANSKEDIPVAVTGDIVALAGLKDTITGETLCDPDKPVVLERMEFPDPVIKVAIEPKTKADADKMATGLIKLAQEDPSFHFSRDEETNQTVIEGMGELHLDIIVDRLKREFKVEANVGAPQVNYRESISKVAEIQYVHKKQSGGSGQFADIIVRFEPLEAGSGYEFKSEIKGGAVPKEYVPGVMKGLEESLPNGVLAGYPVVDFRAVLVDGSYHDVDSSVLAFQIAARGAFREGMRKAGPRLLEPIMKVEVITPEEHLGDVIGDLNSRRGQVNSFGDKPGGLKVVDSFVPLAEMFQYVSTLRGMTKGRASYTMQLAKFDVVPQHIQNQISVAKTEEAAA

SEQ ID NO: 2863 - protein, 296 aa, Zea mays
MHRPRSHRLCRSRVAAAVSAAIIIGLGAAGVGEAATGTFIYAGCSPSKYQPGTPFEANLESLLASMAGAAPKAGYSSFTAGAGGVGNGTTAYGLYQCRGDLAGADCAACVRDALGQLGQVCAAAYAASLQLEGCYVRYDGTDFLGTPDAAMVYRKCSTSSSSDGEFLRDRDAVLAGDLLQGGAANNGSSNGYKAGSSGSVQGVAQCLGDLAAPDCAACLAQAVGQLKGTCGTALAADVYLAQCYVRYWADGYYFRPTQDYSQDDVGRTVAIIVGILAGLAIFVVFISFLRKACMIR

SEQ ID NO: 2864 - protein, 347 aa, Zea mays
MASSSASSRHQVTITLGRSGQVVKRRAMSDDINDGELPLLGKKRSVRDRLGSNVSDSDFYESQQRNKRRQLESNSSHGDDGSDRLVGKGDLRLKLMRKGLLPRSNGSAEQNDIDLREKLSRNHKLPNYDSRGHAAESRASYDMRDEPPELSSRYSSREDVLGSRHSSVVSRVPYARSVDDLLKLDYSRKSYPSWTDDGLRHRSPERMLKVRSDMYPRIAYDQIRPMPPLRSAGSSRPQSFITRDAPDTSRSQPYAGKSTISIDTVQRTNGITPSTAALPKAPVMDEAPLTVTGLLNSLGLEKYVVLFQAEEVDLSALRQMGESDLKDMGVPMGPRKKILLAVGPQSK

SEQ ID NO: 2865 - protein, 299 aa, Zea mays
MQMDSYNYNYASFFHDEAPSFYPHVAVPPSPELPIGLIASPGEPEPPFAPPMPASFQDYTGAVGVGVGVRAPFGGASVHGQAIDALGGGDGQREQSMAMAEDGEEPAPRRRQPAGGPAAAAVESSRGFRHMMRERQRREKLSQSYADLHALVAARSRGDKNSIVQAAAVYIHELRGARDQLQRRNEELKARILGHDAGQQCVKVQFEVDEPASAIDSMIGALRRLKGMDVRARGIRSSLSGRRLWTEMNVETTMAADEVERGVEEALLQEVERKQQQQLGAGSAAPGFPGPSSHVQNVF

SEQ ID NO: 2866 - protein, 4279 aa, Zea mays
MATEDEEREAADGTEVPVEAVVLGTFHLHAHPEGKLSSLMDIKSMGETIDSTEGTLKIPEDQVLVEAPSDVQLPPEHNLNGEASSLNGHTDKEEKVSVEQPHDNDQEEAELDQNNRINKEDAADGLSHGESTTEDSCLLKHKKDEESKGDEQQDLGVTVDDDLVQEDTLKTDNAIEQTDDGQQDQDQEPEKANENTEPASIANNDDVEIVAETPTGLQAPVESRMNDSDGIPETIDEETETDEPAQADGVVHPEDVAKVEDQQSQQDDTVDADVAPEEVKCEETDQQEEKPKSEAHEPTIDTREALNQEPAEETDDSMNKKIEETAHQRNMAAPKETTLEHEATMSATPVNTQVQDQEPLEEIEDTEKGIQPSSGSGDAIPEDQSNLSVTIDNDTVNEDTVIGIEQQDDGQQDEDLEPEKATEDTQPASMTNIPQVEVVTEASSGVQTPGDLNLNNSDAVPDTIDANTETDEPSKAHSVVHPEKKERFLEDATTEEPTEEVVKVEAQQSQQADVMDANMVQEEVPKSEHADEPATDAFEVLNQESVDEPAIQAPVTIQVQNQEPLEEIELAEAVDTEATVQQSSAAFEESVPEHQCNLGATHNTEQEDTLEASGQSKGGQEYQDLGPENATENTQQASMTNILDVEVITETPSGIQTPMEINLVISDAIPDATDGNTETDEPAKAHTFVHPEKNEVFPENTFTTKPTAEVVKVEDQQNQQDDAMDAEVVLEEVPKSERADEPATDALEVLESVEETDDPMNEKTEETTQQSNIPASEETTAEYDATREPPANNQVQNKEPVDERESTVEEREVAEAVDTEAPVQQSSVAFDEAVPEEHHNLGVANNTVQEDTMEATGQTQEGQQYQDLGPENAAENTQPASTENIPDVEVITKAPSEIQSPVEINLDISDAIPDTNDGNTETDEPAKANTVARPDTEESFAEDTSTGPTEEVVTLEDQQSQQVDAKDADVVQEEVPTSEHTDEPATDAVEALNQESDEETDGPVYENTEETTHQSNMPASEETLPENDVTTREPSVTIQAQNQESLEEREVHEAVDTEATVQPSSASFEESVPEHQHNLGATNDTVQQDTLEATKQTKGGQQYQDLGPENATENTQPASMANIPDVDVITKASSGIQTPVEINRDISDAIPDATDGSTETTEPAKAHSIIHPEKKESFQEDTSTAEPTEEVIKVEDRQSQQAEAMDADVVQEDVPKSEHADEPTADALEVLNQESIEETNSPVNEETEEATNQSNMPASEETIPKYDAATRDQPVNIQAQNQEPVDEGEATVEEREVAEAVHTEAPVQQSSVAFEEAVPEDQHNLGVANNTVQEDMMEATGQTKEGQRYQDLGPENAIENTQPASTANIPEVEVITEAPSGFQTPVEINLDISDAIADTTDGNTGTDELVKAEGVIHPENKESFLEDTSTTEPLEEVANVEDQHSQQADAMDADVVQEEVPKSKADEPATDTLEVLNQEYAEETSGPANEKIEETANQSNMLTSEETVPEYDTATRDPPVNIQAQNQESLEEREATVAENEVAEAVDTEAPVQQSSVALEDAVPEDQHNLGATNNTAQEDTQDAIGQTKEGQQFHDLGPENATENTQPASMANIADVDVTTEAPSGIQTPVEINLDISDAIPDTTDGNTETDKLVKTEGVIHPEKKESFPEDTSTAEPTEEVANVEDQQSQRADAMDADVVDEEVPKSEHADEPATDALEVLNQDYAEETNDPVNEKTEETGNQSNMPPSEETTPEYDTTTREPPVNIQAQNQESLEEREATVEESEVAEAVDTEAPVQQSSVALEDAVPEDQYNLIATNNTVQEDTQEAIGQTKEGQQYHDLGPENATENTEPASTANTPDVDVITEAPSGIQTSIEINLDISDAIPDTTDGNAKTDELVKVDGVILPDHKESFSEDTCVVEPTEEMIEVDQLGQQADAIHAEVLQEEVPEMIEVDQLGQQADVIHAEVLQEEVHKSEQSDEPGVDAQEVLNQESAEETDGLVNVKTDETEHKSNMVVPDDTIPEHDAQTREPPVNIQEQSRESVGDAEAVNTEAEMQQNSVAFEETTPENHVATSEPCSEIQHAHHVEPEEINGPEDGKDDEITNMSSREYLVRDNVLQSGPIIDIQPVQELEQIKTDEASNQTHAVIFNDLAQEDATATSEPQVTETELKDIEATEAEEITKLDHVTHSKELAVENDSTADEPHKGEIHQTLEQDLVEVKDTGTYHEKTISTSEDTVQDNLTEDEPSFGSQEVDDAESTEETKQNIAENIAEVSDVAIVDDAIEQNVLQTEDIVEMHKQELEREETERIEPVESEEASDQRNDAPFDYSAREDNTKESEIQQTESATETNEIEPTEIEAVPRESNTCVSEEPSQEDHIKESETSFDNQEVNITESSEVNDSHKDIISGGISDPSNTASAGDSSEGSNVPEGEPPEQAVQELGSEEIKNTQIDEVNETSLEMNATVFQIPSQEENPDTTKLHESTEVSNIEATEMHGNPHQSDLAAQSEEQTTEGISSGLKPESIEGNDTEAKKCQSTSQEKTISASESVPEDATTEPDVDHQQLQDQESAKLKETEADKFQEIVSSNTLSSEEFTSTEPSSDTEADNSQLAEETEDTEIVKSNTALAEAAAPETDATADTSSFHETDLEENKDTGTIETEDGMVSSDYTSEKMDTETMETEAVPHDSSDANIKEHTEDDTSTPNAPHAGTEPVHELESVEVSADTTEHPGETHDSASDELTPTEENTAVTEPSFSTQEVQNLTSQEIKDSEDDKTDEFSDINSFPIPGEADQVPRSETTPDVQEVEELGLTEETRDIEAIEPGDQQEDIVSTLEKPEIDGEPSADNQQVHEDKLPEVEDNKAIEAEASKQSNIATPDNAAEERNELESDPDPYAQPAEQVELSKDNENSQLVKTEETSDQSNFVVLRRTTEDSVAREIDPPVAIKQEQPVEEIKGVDATEAEEDFRTTQAVAIEKLASVNKIATVEPTYDIQRMDDLEATEEKKHAEAINEGDQSNIAVSEEQTPTYNGETPEDHHVESNEGTMGNETDNIILAHGIKDEIQKSAELKDGPCDLSETVLTTRRSENMIDEDNVQTYGNDTVEASNSIHQVKEEPDAGTEHNSSQMISECSGENETHVQDRDVDMWILTEGVIAEASQALLENDPQAAQDTIEKDDTTKSSEPISDHDSRQHCDVEALQQQSCETEALSILEQDEALQKIDSDQKQKEVEEIESQNDELQVDEQKHEDKRDDLAKEPLVEYQNFENRASNNTKDNDAFKVNKRTLYVLPFLDFFNQKQRKTNFTIETLQVEQTEAANSEILKNKALHISKESTPSIMAMKVENIKETSEGTEEDDAAKNDNKDEQENAENVDIVSKTSTNEQGQTTDEIRKEEDPVHIIQASEKEIADEIEESKEIHEDNAICHDKLQTNSEKEESPQPHSNEPYNVDAKIDDTTSLCEEIIHDNTSINPREIEEIGENKGPDFTSEPSVESSIQNNVEDSSSHHKVEDEKLSMSEKNDVDTEAMQEINDESGADINQTEQCQEEITADDVLQLETEGNSFDKIEETASNEETETSTAATEAVTFNEDITDKVSGADGAPSNGSLKTFTDTGRDIDVPLVITTSKEESVNDTMENLNLDLPGHQAQDGNTAEKVLSLEEREREMPSSEKLLQTEPGENQIPNEQDEKDIRDENQTLKEKDEDDMQDTEFGEAKKEVQQELPVSHFLMNLILGKESSDANEDSESEAARKQGEATEDDSCTFISEQEESLGSLPTENKVDDNPTFVEQEKHEVKCSEETQEMVEEQSDDQLHTERSIEIDEDIKKNTRALEIPAYQDNPQDGISGELQTEEAAGVSTKMVTRDIDISSVVLDNRTVGTVCQEKMEVSTKNENGSLRSSLNDSTNTMAPQDDTLGEGQSRLVLEPLPEDKSVDVVSEQAPLLTESGMTDANDLSSDTTSAQNPVSTKPTESARVEATYSTDIQLENEEVDKKEEDQHANTTKDEVSKEIVESSHINLQKITRPEEKSNELETQITEPVCDSQAILAHEKEISEENFPTAVEIQADGPNMQINQDKQDEAADIETEMKPEKLGESNFQEHQDNGTEQKSPKETDEGDQQLVAKKEILTQEMDVHETVERPQQAVESPQQTVSITSNEDQELFDSKVQERDLNVVSPREASEAEENFVDVTKPEFSTDEEQSPKADAEEKIYDEKIKDIEGTKNLTDEAAIKTEAPGAAQKTRKKYSLLSGVGSKVKHQLAKVKKAIVGKPGHTKPVSPTA

SEQ ID NO: 2867 - protein, 311 aa, Zea mays
MSHSPLPPPVFQNISLRFSESFSLQGTETTGAFTPPAFPSPPGTTGLLAIIRPSMAKLVNKLVDSFDHHEAPAPDVGCVRAVLAELVLTFLFVFTGVSASMAAGAGGKPGEAMPMATLAAVAIAHALAAGVLVTAGFHVSGGHLNPAVTVGILVRGHITKLRALLYVAAQLLASSLACILLRYLSGGMVTPVHALGAGISPMQGLVMEVILTFSLLFVTYAMILDPRSQVRTIGPLLTGLIVGANSLAGGNFTGASMNPARSFGPAMATGVWTNHWVYWIGPLLGGSLAGFVYESLFMVYKTHEPLLNGDI

SEQ ID NO: 2868 - protein, 1156 aa, Zea mays
MSVPPAGKRQVSLRGSSAKEITRDALLQKVSEERQLRSHLRRAAAAAFSIQRIWRRYHVIRMVSEQLHEDWELLMNQPNIDLTTQWISKKMLRPFLFFITQPSSWYIGQWSKTVESILTCFKIILNSINSMDARKNFCSFAVGIPEERSIWLYQAKKLISLCSSILARYDHSCCKDGSIVDMTAIAMRLAVSLTDCKTWKSLNSENTSAADASVQSLIEFIGTCQSGMYNCVRQYIKSLGPHVTSAKKSSATATDDDFLITASAVTLALRPFDSKKAKGGVDLNGASKKYFTLILTIPDLCKRMPPLLLPALKHFSVLQPSLNILLISKDKIFEEIIKLEQSEVSASIIPCSGWALGNIVNLATNHDDLSNSGCFIQELDFCLYVDVINCISENLLESFEKSKGTSQNVGNITFHADTSVAEEEDTNDDCRMRTLFMDLLKPIYQQWHLRKLLMLAKEDFPCRRATDYDPNLKNIHFRILKLSDVICFYYHMLRIFSSLNPSIGAMPILNMLAFSPGFLVDLWEALEMPIFGPPIQNSQETGHEKQLATSSSGVQVSSMRQRRNAKDTANRWSNVLQKITGKSNDSEEGTLSDSILFSHESNDDALTSWDIEAMRHASEGIGKDLMCIMYLFCAIYGHLLLVLDDIEFYEKQVPFTLEQQRKIASALNTFVYNSFIQNSGSYSNPLVDVAVRCLNLLYERDSRHKFCPISLWLAPARNGRIPIAAAARSHEAAFGIFPGIPHRSSVLTTLPHVYPFEERVQMFREFIESDKASRRVTGEVSGPGPGSIEIVIRRGHIIDDGYRQLNCLRSKLKSCIHVSFVSECGLPEAGLDYGGLSKEFLTDLSKSAFSPEYGLFSQTSASDTSLIPSNSAKLLDNGIDMIEFLGRVVGKALYEGILLDYSFSPVFVQKLLGRYNFLDELSTLDPELYRNLMQLKHYDGDVEDLFLDFTVTEELGGKRIVHELRPGGKNISVTNENKLHYVHAMADFKLNRQILPFANAFYRGLSDLISPYWLSLFNANEFNQLLSGGLQDFDVDDLRNNTKYTGGYTESSRTVKLFWEVIKAFKPTERCLLLKFVTSCSRAPLLGFKYLQPSFTIHKVPCDVTLWASIGGQDVDRLPSASTCYNTLKLPTYKRSSTLRSKLLYAISSNTGFELS

SEQ ID NO: 2869 - protein, 476 aa, Zea mays
MALGQQLRVLHALDVARTQLYHFMATAIAGMGFFTDAYDFFAISLVMDLISYLYYEEQIDRGVKATINGIALCGAVPGQLVFGWLGDKMGRKRIYGVTLLLMVVTSLASGLYFGTNEASNVVAVLCFFRFWLGFGIGGDYPLSATIMSEYANKRRRGAFIAAVFAMQGFGNLAAGIVAVVVSASFLRTNPRRNANFVWRIVLMLGAVPAILTYYWRMKMPETARYTALVAKDARKAASDMSSVLHVEISPEDEAVRQDQYGLFSPQFLRYHGTHLLATSACWLAVDITFYSLNLYMKDIFVDVGLIDPPGKNHLFMRMTVTTLLHTGIALCGTLPGYFFTVAFVDRIGRVRIQLLGFTMMSVFDSHPRSHLCVLETAGNNTAQDGLRSLVWLDQLLRQFWSQHHNIHSSGGDFPSTDARDVPWHSRRIREDRRHHRRVWLHVQHGRTRRRPKKAVGTIFLQPSRPCVHLPSTGFQR

SEQ ID NO: 2870 - protein, 150 aa, Zea mays
MKISLCSVVWFFSLAVSPCSPARALSLSVSSSCCVCLVLYFAAVVDVGMMGALAGASSSTVWLTEESEHASARLHLYTAAPGEWIDAKAQLLLRAHFSFCQLPLLLGTCSAVCIHHRPSSPTSVHRSAPMMRRRRRPGAAVPLITSVAVL

SEQ ID NO: 2871 - protein, 303 aa, Zea mays
MSTNSRANSRANFNNEIHDIGTAVHNSSSLPPAYYDRSLADMFPPHLLKKVVSEVVSTFLLVFVTCGAAGIYGSDKDRISQLGQSVAGGLIVTVMIYAVGHISGAHMNPAVTLAFAVFRHFPWIQVPFYWAAQFTGAICASFVLKAVLHPIAVLGTTTPAGPHWHSLIIEVIVTFNMMFVTLAVATDTRAVGELAGLAVGSAVCITSIFAGAVSGGSMNPARTLGPALASNLYTGLWIYFLGPVLGTLSGAWTYTFIRFEEAPSKDASSSHSQKLSSFKLRRLQSQSVAADADDDEELDHIQV

SEQ ID NO: 2872 - protein, 216 aa, Zea mays
MHHHDKGGGGLVAVALAHALALAAAVGCAANISGGHVNPAVTFGALLAGRICLVRSLVYWAAQLLGAVAAALVLRLATGGMHLPEYALAGGVSGWNAAVLEAAMAFGLMYAYFATVMDKARRVRAGAGALAAPLAVGLLAGANVLACGALEGAVMNPARAFGPAVVGSRRWRHQWVYWVGPMVGAGLSGVVYEHLVAGPAAEEEEPAPSCGDRRRA

SEQ ID NO: 2873 - protein, 952 aa, Zea mays
MSQSPGGREGIYYSRQRKPERNGSVFTPIAAMYSSGHALPVANRSHGLVFGSLSKDWDDIRQRKDQLVNFLASLERASGDSAAAGKIEDSKLASPVEPTEQKEKAAIIVLDSDDEDGNGSGNSKLASETNKELGTSGLINNIAERMTFNGSQAFGTVHTYGDKNTQIVPYGQCSALVNQFPLQTSWQPSIQFERVVLQKRPEEQRMQDLVAASIAEKRAETQVFLSLPTEKKRRRSDPSLHASDDTATVPKQRKSKGATVVAAANLSLVSQQTATSPEPDMVIEEEEKHKNESDGLDDYWKDFALAVESTKLDEVDEAAIEKEDNGKMEDIDCNHDIRIHEDLGHVCRVCGMIVRRADSIIDYQWKKASRRRTNGYGGHSKDADEIDCGTVKLSEDFIVADIAIHPRHARIMKPHQLEGFNFLVKNLIGDKPGGCILAHAPGTGKTFMLISFIQSFMARYPSARPLVVLPKGILGIWKTEIKRWQVQDIPVYDFYSVKAEKRVEQLQILKSWEDKMSILFLGYKQFSTIVTDDGGSNVTAACRDRLLKVPNLLILDEGHTPRNRETNVLESLNRVETPRKVVLSGTLFQNHVEEVFNILNLVRPKFLRMESSRPTARRIMSQVEIVGRSSKGLADGAFTKAVEETLLNDENFKRKAHVIRGLRELTKDVLHYYKGDILDELPGLVDFSVFLKLTPKQKDIIYKLEAHDRFKRNAVGSALYIHPCLSELSEVNAEHRANTFRDDLVDSLVDSITVRDGVKANFFMNILSLANSAGEKVLAFSQYISPMIFFERLLVKKKGWHVGKEIFMISGDTSQEDRELATDHFNNSADAKIMFGSIKACGEGISLVGASRVVILDVHLNPSVTRQAIGRAFRPGQQKKVFVYRLVAADSDEVKVHETAFKKEVIPKLWFEWSEHCTTEDFKLGQIDIDDSGDELLDTKAIRKDIKALYRR

SEQ ID NO: 2874 - protein, 512 aa, Zea mays
MSRSLRTNKTAIISSVSFKQLFFLLLDSKPIPFTELSPSAMGDANGGSMHVVMLPWLAFGHILPFTELAKRIARQGHRVTLFSTPRNTRRLIRIPPELAGHIRVVDIALPRVERLPEDCEASIDLPSDDLRPYLRVAYDTAFADKLSAILKEPGPERPDWVLIDYAAYWAPAAAAKHGVPCAFLSLFGAATLSFYGPPEGLMGRGKYARTKPEDLTVVPDYVPFPTTVAHRSFEARELFKPGLVPDDSGVSEGHRFGVSIGESQIVGIRSRTELESEWLQVLGKLYKKPVIPIGLFPPPPTQDIAGHEATLRWLDRQAQGSVVYAAFGSEAKLTSAQLQTIALGLEASGLPFLWAFRPPADAAPGQGTGGLPEGFEERVNDRGLVCRGWVPQPRLLAHESVGGFLTHAGWNSIAEGLSRGVTMVLLPLMFDQGLNARLLVDKKIGIEVERDEDDGTFAPKDIADALRTAMAENQDGTRVKELAEVFGNDEANDQCLRDFLRYLSEYIRQHQG

SEQ ID NO: 2875 - protein, 575 aa, Zea mays
MGCWRSSLRSGPHAAEKPPRHRHRPPPPPTNGPTSSLNAQQAAPPARASGEVPALAEFSLAELRAATAGFAPGNIVSESGEKAPNLVYRGQLRGPGGAPPRAVAVKKFAKLAWPDPKQFAEEAKGVGGLRHRSMANLIGYCCDGDDRLLVAEFMPNDTLAKHLFHWENQTIEWAMRLRVAYYISQALEYCSTKGWPLYHDLNAYRVLFDENGDPRLSCFGLMKNSRDGKSYSTNLAYTPPEYLRNGRVTPESVIFSFGTVLLDLLSGKRIPPSHALDIMRGRNIQAVMDSHLEGNYSIEVATTLVNLASQCLQYEPRDRPDIKKLVSILEPLQKKIEVPSYVMLGIAKPVEEPQAPPTPQRPLSPMGEACSRMDLTAIYQILFTTHYRDDEGSNELSFQEWTQQMRDMLDARKRGDSAFKDKDFKAAIDCYTQVGMCFLFMKSYLKVLPRPPDISLKCSCRERGNLVYFIYLPTMGHSNVADSSFPVFVAQFVDVGIMVSPTVFARRSLCYLMCDQPDAALRDAMQAQIVYPDWPTAFYMQAVALSKLNMQSDAVDMLNEASQLEEKRQKSTRVP

SEQ ID NO: 2876 - protein, 368 aa, Zea mays
MFNGSKMASPLAQPGAARAPGLDEQVANKFASGKGGDAAAYPAPNPGMMTATVRRSTVPNLFTFGNDVYSRKKELGGSNSNSNKELHMFVWSSSASPVSEANLRNAVNHAASTDFAAAPPPAETDIRVVCPCVSHASGVSGTVTPAKAGPRGQRRGPGDRGRPQEPRDGAGRQVPLSGSPYVAPRKKGADAPGLEEAAHPMPPASVMTRLILIMVWRKLIRNPNTYSSLIGLVWSLVSFRFNIQMPSIIKGSISILSDAGLGMAMFSLGLFMALQPKLISCGKRVATFAMAVRFLTGPAVIAATSIAIGLRGVLLHVAIVQAALPQGIVPFVFAKEYNCHPQILSTAVIFGMLIALPITILYYILLGI

SEQ ID NO: 2877 - protein, 473 aa, Zea mays
MHMMRRLKSIASGRSSVSDPGGDSGSKRPKFEQDGAGDIVMEPHLTEDKPVRIDQESSSTSNRDAEASTSTSMKPVKTEEAGADLLPKEMNIMTISDDKADGHNDKEGEGVTLDGTGTETGQIIVTTIGGHNGKPKQKVSYMAELVVGTGSFGIVFQAKCLETDETVAIKKVLQDKRYKNRELQTMQLHDHPNVVQLKHHFFSTTQKGEVYLNLVLEFVSETVYRVAKYYNRMNQRVPIIYVKLYAYQMCRALAYIHRVVGVCHRDIKPQNLLVNPHTHQLKICDFGSAKKLVPGEPNISYICSRYYRAPELIFGATEYTTAIDIWSVGCVVAELLIGQPLFPGESGVDQLVEIIKILGTPTREEIRCMNPNYSEFKFPQIKAHPWHKLFGKRMPPEAVDLVSRLLQYSPNLRCTAVDACAHPFFDELRDPKACLPNGRPMPPLFDFTAAELEGLPAELVHRIVPEHMRKEVN

SEQ ID NO: 2878 - protein, 360 aa, Zea mays
MVVCKCRKATRVYCFVHQVPVCGVCICFPEHQLCVVKNYAEWVVNSEYDWPQHCSSCNSVLEGGTEETTRLGCLHVVHTKCLISHIQSFPTQTAPDGYVCPSCSAPIWPPSSIKDTGSRLHTELKEAIVQTGMEKNVFGNHYVTIAKADTQTPPAFASDPLKTLSNRDDREFNSANAAKDAALPSTLHSGMYSSAVGSETTIHVDPEIVEIEGSSPVSTQFSVQDSNFIRSPSPHGPGAMTRKGANTVDRQNSEISYYADDEDGNRKKYTKRGTFRHKFLRMLLPFWSSALPTLPVTAPSKKESDALEGSRSRHQRSSRMDPTKILLAMAIMACIATMGILYYRLSQRGLSETFLEDETQ

SEQ ID NO: 2879 - protein, 649 aa, Zea mays
MIRSSPACSKKKKVYLFGTQSSGSGSESGIQTQKCTKSKGANESGNNSGSNDDEAGMGLNARDDSDNGSGTQAQNSWTKLAVEIDSPQAMSLDQLADPANSTCAQVIHSKSEICSHRWLPGSSNRNCKKQKYTNDDFKGKDLEIDGPGNLYMDHQSSPNERPIKAADHENNSKESMMGNLGDATVRAADLIGSMAKNMDAQQAARAADTPNFSSEVPEGKDDFKGKDLEIGGPRNLYMDHQSSPNERPIKAADHENNSKESMIENLEEPTVRAADLIGSMAKNMDTQQAARAAEDTPNFSSKVPEGKGKNDQHDNYVLPSLELSLKRSRSCGDGANDTVNDDEQRNSALRRSNLSAFTRYHTSAASNQGGTGLVGSCSPHDNSSEAVKTDSTYNMKSNSDAAAIKQGSNGSSNNNDMGSTTKDVVTKPSTNNERVMLPSAIKANGYTSTFHPVQQWMVPDNATAGKAKADEVANNAGRNSHPGDVQSNLTQQHRPTLHYVHFENSGSGALQCGSSNVFDPPLEGQATNNYGVKAGSNSGSNKGQNNGSTAGASTAAANAGRTDTEIRAIDKSGPGGGSGSGNDTYVRRLAASMTPRQEQLKKYREKKKDRNFGKKVRYQSRKRLADQRPRVRGQFVKQAVQNQEGDGER

SEQ ID NO: 2880 - protein, 2169 aa, Zea mays
MESPTYTPEVVHPTTDAIEPNGSALTPCDWVIPDIASNPFLPASTQTEDADSLRMSTRPLRRKQHVPRGERQAILARRNRQFEASISRNMATVAEDIISDAEEGDDRTQPHMTAKINNNVDDDDGVVFEDDADENEGYLFAGQYEDTDEDIEIDGSQDESSAIDVPDPYDKVYSNIPKETHMLKTVPNCGYCTAKKFEYETPGFCCRGGKVELAPLETPPQLKRLWDSADSDARHFRDNIRFFNGHFSFTSLYCCLDSMTTNVRDSGIYTFRAQGMMYHNIKSFGRDGGAEHKHLELYFYDDDPTLEHRYRKCREEHQQKDKEVIRQIVDILRGNPYSEHLRTMGHVENLDDYRIALNLDQTLNQKTYNTPLTSEVAAVWIEGSKGRGQFSKSVMLHGKDSSSHCIRSYHGCYDALSYPLFFPRGELGWHGNIPKVGVSMDEVDAYRATHRASNANDENAAEEIRPGVFNPILHGKRLFQQFAVDTYIKIENSRLDYIRKNQDRLRADLYQGLVDSMLDGDIRGEKVGKRTVLSTSFIGGPRDMRRRYMDAMALVRKFGKPDIFLTMTCNPNWDEIRRELLPGQTPQDRADLVVCVFHAKLQELKHRLTKQDILGKVRAYVYVVEFQKRGLPHAHFLLIMQRKYKLTCPEQYDLLISAEIPSNKYPELRKMVIKHMMHGPCGSLNPNCPCTKGRKSCKNHYPRPFSDTTLQGKDSYPIYRRRDDDRKEKVRGCELDNRWVVPYNPYLLRLFNCHINVEACGSIKAVKYLFKYIYKGHDRASVVMRDASKADDDVDEIKQYRDARWVTPPEALWRIYGFELSQISPPVMQLQLHLPNMHMVAFHERQMVERVVNRPGVDRSMLTSYFEANRFNKEARGILYRDFPEWYTWQSGKGKVWQRRKRDTGGQVGRIVSAHPAEGERYYLRVLLNHVTGAASYVDLRTVDGVTLPTFHEAAERRGLLESDNTLDECLTERALFQMPSSLRRLFATILVYCEPSDVAVLWQKHKDSMSEDYQHKSQNKTHVEQMVLIDIRNMLQSMGKDIKTFPLPPMIDAYDDAIGTAREVYEEESIQPTVEDVALKDSLNEEQRAAYDKIMSAVDTDQGGLFFVDGPGGTGKTYLYRVLLATLRNQGKIAVATATSGVAASIMPGGRTAHSRFKIPLTIDDGAVCSFTKQSGTTELLRKASLIIWDEASMTKRQAVEALDNSMRDIMGRPALPFGGKTIVFGGDFRQVLPVVRKGSRAQVVASSLRMSYLWESMSHLKLVSNMRAKNDPWFAEFLLRVGGGTEETNSDGDIRLPDDVCVPYSGSDNDLDNLIDFAFPNLNENMSDSTYITSRAILSTRNDWVDMINVKMIDRFQGEHMVYHSFDSAVDDPHNYYPPEFLNTLTPNGLPPHVLKLKIGCPVILLRNIDPANGLCNGTRLVVRGFQRNSIDAEIVLGQHVGKRIFLPRIPLCPSDEEMFPFQFKRKQFPVRLSFAMTVNKAQGQTIPNVGVYLPEPVFSHGQLYVALSRATARSNIKILVIPAVDGRKKLRKGVKKTPTVDCGTYTKNIVYKEEIPCEPRVEVVLIDDAFVERKWMECLFQPSAYLGDEVIDCYINLIKAQKHLKCRSGGRVYIENAFQFNFLKRDGDLEIKTEELYPIKDMTHICSAERRVLLYLDHDMVFIPINIRETHWYLAVIHARNMEIQVLDSLGTSQDRKDLTDSIKGLQRQIDMISQRKELKDHRWPDLQVASWPLREIDMGYAKQTDSSSCGLFLLNYIEYWTGDELSDSFTQDGMSHFRKKMAAILLSSDLNKRRGCLLYKNEKEVDSGSPSDVEILENPTDSNKRKLLHVLDDSEVVFEDEEGPITQADLQRWFVDDWDKRAPVKVSNDGCTNDFLMVGLSTKDMPVTKADSIDVLCDYIMAIEDDTTLERTWVRSFNPFKIEISVKDLQNILTTTQDMILRCFDMAVRLLANKESRKPKEEIINNRKHYMDMRFWRMVGFGKIPKYHQDPTTEELAKTLDCWPSMNYYITGCRYVLMPWKFNGCHALFVIDHVKKHVTFIDFTPTQDWCKHMPYKRFAEAIIMASKKYKIAYSKKRSGWTEDIFKWEHTIQTGVPIDLRGFNTSYLVLQAMAMWGNDRRLKFVGDAKTLRRNFVIDLLSYEDNSCRYAIPANIQQRLVDIARKD

SEQ ID NO: 2881 - protein, 523 aa, Zea mays
MFNKIIKRGNRKGARGDSAEVAARPAAPSSSSGSGGGGAGGAAPVTVNHASRATAPSPSSPTSPHVTPSAFATNPAVGAASPPLLEPLPLLRDVAAADRPGLILRKLRLVAALFDLSDSLKHPREKEAKRQALLELVDYVQAPAQAAGANAPTRLPDHVQEALVLAISANIFRPLPPALHESAAAIDPGAAPDDDEEPYLDPSWPHLQLVYELLLRYVVSPDTDTKVAKRYVDHAFVLRILDLFDSEDPREREYLKTVLHRIYGKFMVHRPFIRKAINNVFYRFIFETQRYNGIGELLEILGSIINGFALPMKEEHKLFLARALIPLHKPKSVVIYHQQLSYCIVEFVEKDYKLADTVIRGLLKYWPVTNCQKEVLFLGELEEVLEATQPAEFQRCMVPLFKQIARCLNSSHFQVAERALFLWNNDHIVSLIAQNRGVIFPIIFEALERNIHSHWNQAVHGLTANVRKMFLDMDSELFEECQQQYMDKQAKAKEMQEQRESAWRQLEAVVAAKAAGDDMVLVN

SEQ ID NO: 2882 - protein, 148 aa, Zea mays
MAFSGRIQELVRKYGKVAICVHLSVSCASIAGLYVAINNNVDVEAVFRRFGISPGVTVGGEASPAPVSRDEHLRDVPLPPMANEVLQEETERERQPRNRTMELVASSGGAFALAVVCNKALFPVRVPITIALTPPVARALSRWRLVKS

SEQ ID NO: 2883 - protein, 281 aa, Zea mays
MACSHIAAAGVSSPAAAAARSPAHSPASAFARLRSTPRFASAGLSVKGNGAAFPLVAAAGPAAAAPVADLDGRPATEKQPIIVIDNYDSFTYNLCQYMGELGLNFEVYRNDELTIEDVRRKNPRGILISPGPGEPQDSGISLQTVLELGPTIPIFGVCMGLQCIGEAFGGKIIRAPSGVMHGKSSPVYYDEELGKALFNGLPNPFTAARYHSLVIEQETFPHDALEATAWTEDGLIMAARHKKYKHIQGVQFHPESIITPEGKKIILNFVRFIEELEKQRS

SEQ ID NO: 2884 - protein, 227 aa, Zea mays
MATAMRGSSLLRFGFRHPSCLLFQSPRCPAPSLGLNLAVGRTGLIRLRCSAAGAGDAGGKKVSARLALTQQVLRNAEERAASAGSDPAPKITLDHVTVNFARSGGPGGQNVNKVNTKVDMRFNVKEAHWLGERIKERILQAEKNRINKDGELVISSTKTRTQKGNIEDALQKIQAIIDAASYVPPPPTEDQKKKIEKIAAVAERKRLQNKKVLSQKKEFRRNRTSWD

SEQ ID NO: 2885 - protein, 265 aa, Zea mays
MEPGSPAPKKSRLVHSADCEMEEAQAPSSSNAAGGVNQSLHWTQWQILDSILPTGGFAHSYGLEAAMQSRVVNDQEDLRSFVVQVLDSAGSLLLPFVHCACAGKSPGDAAAWAKLDRLLDATLTNEVARKASAAQGSALLRVAASVFAEVPALQELRRTLLGSKSVSFHHAPVFGLVCGLVGFDGETAQRAYMFVTMRDVLSAATRLNLIGPLAASVLQHQLAPDAERMVRKWRDRDVSEASQTAPLLDAVQGCHAYMFSRLFCS

SEQ ID NO: 2886 - protein, 389 aa, Zea mays
MDSASSLVDDTSSGGGGGASTDKLRALAVFAAASGTPLERMGSGASAVVDAAEPGAEADSGSGAAAVSVGGKLPSSRYKGVVPQPNGRWGAQIYERHQRVWLGTFAGEADAARAYDVAAQRFRGRDAVTNFRPLADADPDAAAELRFLASRSKAEVVDMLRKHTYFDELAQNKRAFAAASASAATASSLANNPSSYASLSPATATAAAREHLFDKTVTPSDVGKLNRLVIPKQHAEKHFPLQLPSAGGESKGVLLNLEDAAGKVWRFRYSYWNSSQSYVLTKGWSRFVKEKGLQAGDVVGFYRSAAGADTKLFIDCKLRPNSVVVASTAGPSPPAPVAKAVRLFGVDLLTAPATAAAPAEAVAGCKRARDLGSPPQAAFKKQLVELALV

SEQ ID NO: 2887 - protein, 183 aa, Zea mays
MAPPDAPLPATRKPDIVGVLAPTDLACLPQDCRRSPPSPSRRAMPAVIPASARPTSTNLLCRCPPAHRHPSPAAATDDLPRPPQGGFCKRACRGSYRRARRGTRTRRRPRGCWRTSSPSRSTLGPPTRSFWPRNGGGDAAPSRPSAGGRTNEFHAATLHLPRRRCPPRTCALVPQHWMGIGSI

SEQ ID NO: 2888 - protein, 582 aa, Zea mays
MGKSPAKWIKSVLFGKRSSSRSGSTKAKDLSKGTTNKAAAAAAAAAGKEPAFSESSPVISEPVLVSAHNNETAREAAKGENSSVQEVPVTDVSQDLEKQGTVGSDTSNDAERLREEQAAVKAQAAFRGYLARRAFRALKGIIRLQALIRGHLVRRQAVSTLRATWLIVKFQALVRGRNVRLSNVSIQATTELSQQNFGGSKPGSWKEKLSSNAFARKLLSSPIVVEALHVQYDEMDPNSAFNWLERWTVSHVWKPISQPKRVGTDAKPHTRKASYAMETESAKLKRNARKSPAVPFEPSQTNTTIENEKTRRNPRKLSSTPAESVPDGQLTELEKVKRSLRKVTSSTVETSKVPSPTTEIPDRQEVQCERPLRSAKQAPIHVENQEPQNVNLSENAKMDILVPDIQPDVEVASDLVTITNEEKVDETPSVVAPAAEIMPLQDINSEENALVNDVEERSKEEHSSTDNLKGSKRRSSFSAKPEYPENGSKNSPALPSYMAATQSAKAKLRGNSSPRLSSDSAEKNGFTRRHSLPSPNNGKIISHSPRTQRPTHAGGKDGAKGDKAMLSSRDASERPLKAEWRR

SEQ ID NO: 2889 - protein, 513 aa, Zea mays
MGPQPPLHLPAANGDSIVDRDVWLACAVPLSRLPAVGAEVYYFPHGHAEQCPAHLPAPLPAPHLFPCTVAGVSLGADDETNEVFAKISLSPGPHRGPAAACRTDPTSDCPPQELSYFTKELTQSDANNGGGFSVPRYCADHIFPTLDFDANPPVQKLFMRDTRGNPWQFRHIYRGTPRRHLLTTGWSRFVNAKLLVAGDIVVFMRRHNGDLIVGLRRTPRYPLVFPRVGSGAGVDPDQPPPRNARARVPPQDVIEAARLAAEGRSFAVTYFPRQAAGEFIVPRDEVEGVLATRWEPGAQVRMQVMEAEDTRRTVWADGHVKSLHQNIWRALEIDWDDSSPLSPNLSRFVNAWQVELVTHPPLPNGARICNPIASLCHGDVSYPLIGSEIQGPPIPASMQGARHTGPCAAPSESSAVLTNRVLFPLLNPDLQMPPFTSPSDSSEILDPESASPPNKSVRLPPAELPVQVKSIQLFGATIMVHVVRSVACGGCCEELNGAPSGDATADGSVGKDV

SEQ ID NO: 2890 - protein, 482 aa, Zea mays
MATSVRGFSSALRDVPGSYGLPLVGAVRDRLDFYYFQGQDKYFESRVERYGSTVVRMNVPPGPFMARDPRVVAVLDAKSFPVLFDMDKVEKRDLFTGTYMPSTSLTGGHRVCAYLDPSEPTHAKVKQLLFSLLLSRKDDVIPVFRSNFSSLLATVESDLAEGGKAEFNKLNDVTSFDFIGEAYFGVRPSATDLGKGGPTKAAKWLIWQLHPLLTLGLPMVLEEPLLHTFHLPPFFVKGDYGALYKYFSTVAKQALDTAEGLGLSREEACHNLLFATTFNSYGGLKVLFPGILANVASAGEKLHERLVAEIRGAVAEAGGKVTLAAVEKMELAKSVVWESLRLDPPVKFQYGHAKKDLQVQSHDAVFQVKKGEMLFGYQPCATKDPRVFGATAKEFVPGRFLGEEGSKLLQYVYWSNGRETENPTVDNKQCPGKNFVVLVGRLFLVELFLRYDTFTADIGKDLLGSSVVFTSVTKATSGPGSE

SEQ ID NO: 2891 - protein, 109 aa, Zea mays
MATFELYRRSTIGTCLTETLDELVSSGAVSPELAIQVLVQFDKSMTEALEMQVKSKVSVKGHLHTYRFCDNVWTFILTDATFKSEEIQETLGRVKIVACDSKLLQPQHP

SEQ ID NO: 2892 - protein, 143 aa, Zea mays
MGRQSTRWWSGGSGSARTLGVGVAVVVALVVSLCFAFIGGRRLAGTLVGGGTPASDSGGRTMAAAAAHPGGQVATTDEEMVYTGRRRLLSGGPGSHPPRCASKCGSCNPCYPVHVSVPPGVLVTTEYYPEAWRCKCRNQLYMP

SEQ ID NO: 2893 - protein, 196 aa, Zea mays
MTTTAGEEKEKQAGGSSMETEEETTPKAKKRPQSLLGSLREAITKVRFLLSSSATRWMLLRSLARGGGSGGAPARRLSFDARPGLLDTIAASPTSSCSSRTSRSASLGTATTRTLSRASSAASPEALTRASSSSGGRSPASSAGDDDVDQRAELFIANFYRQLRMERQVSLQLRYVRGNSWDRTPGATPSPASSRG

SEQ ID NO: 2894 - protein, 275 aa, Zea mays
MAPGLYTDIGKKTRDLLYKDYNTHQKFSLTTCSPHGIAITAAGTRKNESTFGDLHTQIKNNKLTVDVKANSESDLLTTITVDEIGTPGLKSILTLVVPDQRSGKLELQYLHEYTGVNASIGLNSNPMVNLSGAFGSKALSVGVDVSFDTETSNFTKYNAALSLANPDLIASLHLNNHGDTLVASYYHLVKHHSGTAVGAELSHSISRNESTLIFGSQHSLDPHTTVKARFNNYGMASALVQHEWRPKSFITVSGEVDTRAIEKSTKVGLSLVLKH

SEQ ID NO: 2895 - protein, 520 aa, Zea mays
MTCAAYSIRGPLMLAARRSSDVFASSKSCNGKSSVSYPVIQWWSSNCSSFTMRHVASHHHLIVKASATWHSKASATDAATASDERITVLVIGGGGREHALCYALNRSPSCAAVLCAPGNAGIAQSGDATCISDLDISSSDDVISFCRKREVGMVVVGPEAPLVAGLVNDLVKVGIPTFGPSSEAAALEGSKDFMKKLCDKYNIPTAKYRTFTDAVEAKKYVKNEGAPIVVKADGLAAGKGVVVAMTLDEAFEAIDSMLVEGSFGSAGSLVIIEEFLEGEEASFFALVDGTNALPLESAQDHKRVGDGDVGPNTGGMGAYSPAPIVTDELKRTVMESIIIPTVKGMSTEGCKFVGVLYAGLMIEKKSGLPKLIEYNVRFGDPECQVLMMRLESDLAQVLLSACQGELGNVSLTWSPEMAMVVVMASQGYPGPYKKGTVIKNVDKAEQVSPAVKIFHAGTALDGDGNLVAVGGRVLGVTAKGKDIEEARARAYGAVDAVEWPEGFFRHDIGWRALRQKQAAK

SEQ ID NO: 2896 - protein, 242 aa, Zea mays
MEFRGQEEEEQPVSEEMGASSAPSSAPTPAPGNQDHAAEARYHECLRNHAAALGGHVVDGCGEFMPGDGDSLKCAACGCHRSFHRKDDARRRHHQLMLPATATSSRVPLLLPPPHPHYAPPPFPYHGTPSGGGGGTATESSSEERGPPSGAAAVQAQGHVRRKRFRTKFTPEQKEQMLAFAERLGWRLQKQDDALVQHFCDQVGVRRQVFKVWMHNNKHTGRRQQPHLPPPQGQQQPQQQPK

SEQ ID NO: 2897 - protein, 446 aa, Zea mays
MAWLARSIANSLIATEEEPEATDRGPSASPGSSSPPRGVREDLSELTGALANRFQGIASFLAPAAPGGGGALRRPDPAEIAGRFRAGLARLPGRQAVADLARIASSLLPPEGDADWAEEAAGVTEEVVAFARDAASRPELWLDFPLLPDDADSDDFDMTDAQQDHALAVESLAPELADLRIELCPSHMSEDCFWKIYFVLLHPKLRKDDADILSTPQILEARDKLSQEVRYRTELQGSHGDTVPVALGDEGGVSGSLVEGLGVLKGQDDSAMLTSFSNTDYGKPQPIEQDKDIVSVHTIGETGAVSSDNTGSSGVPVQLVPVSRDTTTVAPLSRTEESTHDLSTEDEAAAEEEEEQGLQMSEIPLTDSSPPKDGQQKQPLAAISERSGADYQKSDNVEDGGDGVEDDDGDEWLEEEAWDPGNTQIPIADDEDVSFSDLEEEDDGAA

SEQ ID NO: 2898 - protein, 224 aa, Zea mays
MSVEQLHARKLLSHAAAAAAASSAGPPATEAQVPAAHAHAAAPFSSLNTMVITALSLLLCGLVVVLAVHAVVRCAFRVTRRVCYGQDEESPGGGGGGGADASAAAASFSCQAGPRRKRGPRTGLPPWILYSREVELTGCGAAECAICLTEFVRGDRVRALPHCNHGFHVRCIDRWLAARQTCPTCRRAPFAAKPSLSLPDSAEAPESVQLQARVESGAGQHETQ

SEQ ID NO: 2899 - protein, 170 aa, Zea mays
MGDAGFALLVALAAALAALFLVLLGAAVLRHYCWRRRLDAVAPPRRGFVLFDVCFADDRQQRHAVRPPPPSVERGWARRAAGEGRVEHAPGGGGEAAADDDPVVEPDELEIARWRKIFRGPNRSMSTIDEGTEKDGTTPAFSTPSASPDRRDARAPALGMETVAVQLRQA

SEQ ID NO: 2900 - protein, 118 aa, Zea mays
MPQMEVPTNQIPAGWFTEPASEQPMGLPRTGSSSRLNAQAPEFVPRGPPPPTPAVVLPPPPQVIRMFATPPPPPRGGFFSAPPPRPFEYYAPMVNAADLLPRSNRRGSRKRRCSRPPR

SEQ ID NO: 2901 - protein, 444 aa, Zea mays
MPPTPTAAAAGAAVAAASAAEQAAFRLVGHRNFVRFNPRSDRFHTLAFHHVELWCADAASAAGRFSFGLGAPLAARSDLSTGNSAHASLLLRSGSLSFLFTAPYAHGADAATAALPSFSAAAARRFAADHGLAVRAVALRVADAEDAFRASVAAGARPAFGPVDLGRGFRLAEVELYGDVVLRYVSYPDGAAGEPFLPGFEGVASPGAADYGLSRFDHIVGNVPELAPAAAYFAGFTGFHEFAEFTTEDVGTAESGLNSMVLANNSENVLLPLNEPVHGTKRRSQIQTFLDHHGGPGVQHMALASDDVLRTLREMQARSAMGGFEFMAPPTSDYYDGVRRRAGDVLTEAQIKECQELGVLVDRDDQGVLLQIFTKPVGDRPTLFLEIIQRIGCMEKDEKGQEYQKGGCGGFGKGNFSQLFKSIEDYEKSLEAKQAAAAAAAQGS

SEQ ID NO: 2902 - protein, 770 aa, Zea mays
MAGRPPAAPLVGTALASESQSLWPFAGVEEVKPDTEVCTVLSSDTLPQTPHSAGSLRHWVRPTGAQQCGKCALVYTPELAVNKIMIGNLIHCHDKVKHEAGINGNIKIFTEDEIKRITNNFNTLIGKGGFGEVYRGTLDDDNEPVAVKKYINEDLREVFMEEVRIHSKISHKNVVKLIGYCIGKSTLMIVMEYMSTGNLNDILHCTEISIPLDVRLGIAIGCAEALSYMHSMHLSSGNLICHGDVKPANILLNDNLTAKITDFGVSRLLVGGITQYTTSVKGSIDYMDPIYIQEGRLTPRSDVYSFGLVLCELISRKRIRKGDINLILYVNKGSASGKGFREMSDAAIANEDNMKILKEMKKLATECVSLSIYRRPQMTDVVRRLRMLRKELKERHEYYSESILASHHSWRKNNKQEIIMPTYNSKMQIKKSLGFFKRSLSNSKIQSEPSDVRIFTQEELKEVTNNYSYLISGGTSGKVYRGTLEDNTVVAVRIFSEVLEGFEEAFVNGGMILSQISHRNIIKLVGYCLDADCPAFLYEYAAKGSLSDVLDGHEDFPLDLRAKIVVKIAEALEYLHSPATGIIRHGYVVPSKILVDNNFMPKLTGFSWARRLIQESNTTASDDVISSHQHPSSGFNNDPIHDHYVSLKLKTDVYQFGVLLLTLISRKSFVFYADHDGLVSQFLTACQEDGSGRAFFDDDVAVHGGDVVLLEEMGRLSLKCVCEEIEQRPTMREVAEHLRMITRSWKDFSGSYAGAEGNTPERPPSSDIGD

SEQ ID NO: 2903 - protein, 545 aa, Zea mays
MAEIEVVSEGGRRDEDEERRRQQQQGAGEPDPVVDVYSAAAYGDLERLRGFVEQGGAATALREPDGNGYHALQWAALNNYPHVALYIVEHGGDVNATDHARQTALHWAAVRGSTSVADVLMEHGARVEAADVNGFRAVHVASQYGQTAFLHHIISKYGADFDALDIDGRSALHWAAYKGNADTIRLLLFMDANQVRQDKNGCTPLHWAAIRGNLEVCTVLVHTGTKEELTLKDSGGLTPVQLAAEKGHRHLSNVLSNATKVSFEDKFFPGKSRKIGYAPFLFAYLVICLILFLNSIVFAPNFSRITATAGLWSWAAVSLFFASQVMFYRVSRKNPGYIKANSKRIDPKEPLMEIDLTNSSTWTGNWSQLCPTCKIIRPMRSKHCPTCKHCVEQFDHHCPWISNCVGKRNKWDFFVFLWMGIATSFLGAAVGFHRLQTEPVILSSSESWIHFMVTKHPGAVLFMFLDVFLLTGALILTGAQAVQIARNITTNEAANRSRYTYLRGPDGRFRNPYSRGCQRNCTDFLISGYSNDEEVAWPTLQQTVQ

SEQ ID NO: 2904 - protein, 191 aa, Zea mays
MGLSPFLIFFPINPRGPAPAFLARALGRIHTYLLLRQVRPSMEVLGFAAMGGGSPAWIDVPERSKSAFMELKRRKVHRYVIFKIDDSREEVVVDKIGAPGESYDDFTASLPTDDCRYAVYDLDFVSDDNCRKSKIFFISWSPSDSRIRAKTIYAVSRNQFRHELDGVHFEIQATDPDDMNLEVLRGRANRT

SEQ ID NO: 2905 - protein, 1700 aa, Zea mays
MSSSAAETPREHVESIRRKRYYIGRGEQNPLAEDLHQATNYLSQELYSKDVHFLMELVQNAEDNEYPSEVAPSLEFLITSKDITGCGASSTLLIFNNERGFSATNIESICRVGKSTKKGNRHRGYIGEKGIGFKSVFLISSQPHIFSNGYQIKFNEKPCAECNIGYIVPEWVESTPSLSDIETLYGCSKVLPTTTIILPLKSEKIDAVKTQLSSMHPEMLLFLTKITKLSVRENSDLNHTTVSEISITSEKNYQARKNMHAESYTLHLSAEETGKEEAECGYYMWRQKFPVKPENRVDKRAEIDEWVITLAFPHGQRLTRGKQLLPSIYAFLPTEMVTSFPFIIQADFLLASSREAILFDSPWNKGILECVPKAFMDAFVTLVKSDAPSMSRPSMFNFLPVDSSQIPLLEPVRSGIKDKVLAEDIVPCESYASQKIFCKPSEVARLKPTFWTILAKAWGLGVDLKNLSTHGTYILSSHFDKSIYDSVLNFLDVKNVNHEWYAKCIEGSNLVKEVDEQLYLEILYFVAVNWQNFSGTNMMSIPLLKYVDRGGVLSFWSISRASQCNDRLCIASENKYISWLISWNREFLSSNRFFLPPSTQTALEGCSEKMKSWLQKHARVEVVSIYSYGSVVVNSLGSDQRAVIAFAHFLYHSFKKDHIGDYYLSELCSSMPVIDSYGYVVKERNSIIVPAKGSKWVGLMGTNPWRDHGYIELSAEYKSAGHFAGNYTSEDQLLEFLKTNLQASDVPFILPPDARFSTVSSSLTVDNVFLLLEWIKNLRSRGVRLPDLFLTCVKEGNWLKTSAGYKSPNISFLSSSNWGSLLQTAPSCVDIPMVDQEYYQNRLHMYKEELKAIGVRFEFQEASAYIGTRLMSIAAGNSLTRENVYTLLRLIRFLREKFLSPSDLIESVKEGRWMKSTLGYRRPADCIIYDSDWEVASCISNQPFLDVSFYGAAILEYKVELELLGVIVGFKDNYQLVIDNFKFSSCDITSQATVLILKCIRYVASCDDFIRKLKDLKWLKTIVGFHAPNMSFLVDPEWECLLKVFNGVPIIDYGFYGSVISSYKEELRKTGLITRFEEASKAITEIFKQRVLNSSLKKADVLALLGSYRQLAMHSPLPVELFNSMRTEKWLYTSLGFRSPSDAILFDDAWVSLSPIANLPFIDDGDSCHGLGMEIHGYKDELKKLGVTVDLKEGARFVITGISIPNDPSKLSKATILSLLGCIKSYFTFAAGPLKGFKENMCKKKLLKTSMGYQCPNDCILFDPKQSSVCMEDGPFIDESFYGSEIASFKDALTRIGVTVDIKLGKDLVARHLRSHNKTVTISRIYLYLMTSKWVPASKNSNWIWIPNEMDGGEWVASGSCVLHDRNNLFGLQFHVLDKYYDKKLHDFFLYTLDVRDGPGSEDYCKLWARWEKSVKEIAVSDCSAFWKFIATNWSQNTQKLLSGCAKVPVCTDGKIILTKKEDVFIPDDLLLTDLFSKLTQHSFFIWYPASILPSMSRARLNHIYDTIGVQRISKAATRNDSFTIDGRHFRTIDPSKVVKAGLLQIVLSFLADPALDIAAEERHRMVSCLLNVTVQESDEPITLGYSVRLSSGEVVDVKSSRMVRWEREDSKLYVQSGDGEPSYKEKIEFATYFAEEISQGLLFEMEDQIPSLAELIKFGSLLDFQDAAVGFLLKSKNLQMFPEDEHFLKSSMLDGNNNR

SEQ ID NO: 2906 - protein, 332 aa, Zea mays
MEVESAMLASSLNPAPTLSASATTRFPASSTPNRRPGSLHGRRVCDSPISVEGVSSSPDRRPGSLHARDSLLSMEGESAMLTWIGYPAPALSMEGVSPIAASSLANRVRHGNTGEAVGSLVDAHHGETNGGKGKGYIFHPGRMWRGSSNSVTLRTTIYAQVNAALRKIRDTSEFVQSFASEHLKTPLEELVKGNKNKSTTELWVEKFYKKVTNLPEPFPHDLVEKLEEYLDKLEGQPVDLSSLLYDHQLIDAYQNSTDILQSTIFTQQYVERVLANERDKMKCCSIEYSHPKQSSQAFVYGGILLAGFIVYSLINACCNIIVHLMGNPTCFT

SEQ ID NO: 2907 - protein, 520 aa, Zea mays
MGSLDTNPAAMSALGDNACSGFQPLNPDDVRSYLHKAVDFISDYYKSVESLPVLPDVKPGYLRNELQSAPPTSSAPFDVTMKELTASVVPGMTHWASPNFFAFFPSTNSAATIAGDLIASAMNTVGFTWQAAPAATEMEVLALDWLAQLLRLPPSFMNRTGGAARGSGGGVILATTSEAMLVTLVAARDAALRRSGSHGVSQLPRLAVYAADQTHSTFFKACRLAGFDPANIRCIPTGPETDYGLDPARLLEVMQADVDAGLVPTYVCATVGTTSSNAVDPVRAIADAAAVFNAWVHIDAAYAGSACICPEFRHHLDGVERVDSISMSPHKWLMTCLDCTCLWVRDTHRLTGSLETNPEYLKNDASESGNVTDLKDMQVGVGRRFRGLKLWMVMRTYGASKLQEHIRSDVAMAKMFEDAVRADDRFEVVVPRNFALVCFRIKPRGGMTEEDADEVNRELMERLNRTGKAYLAHTVVGGRFVLRFAVGSSLQEERHVRSAWELINKTTNEIMLEPEQIVVE

SEQ ID NO: 2908 - protein, 587 aa, Zea mays
MDDSAPRISSLPPHYTLAAHSCLLRIHYIWPGWSSSDRSPGARPMAMAGGQNMQVLSALDGAKTQRYHFTAIVVAGMGFFTDAYDLFCISLVTKLIGRIYYTVDGSPRPGSLPPHVSAAVNGVAFVGTLSGQLFFGWLGDRVGRKSVYGMTLLTMVVCSVASGLSFGRSPACVMATLCFFRFWLGFGIGGDYPLSATIMSEYANKRTRGAFVAAVFAMQGFGILAGGAVAIGVTALFRSRFPAPPYDVDPAASTPAEADLVWRIILMFGAVPAALTFYSRMKMPETARYTALVARNAERAAADMSRVLQVDIGNKEQPGAEEEATTGTEARLRGEQEEATTGPPFGLFSREFAHRHGLHLVGTASTWLLLDIAYYSQNLFQKDIFSAVGWIPAAETISALDELFHIARAQTLIALCGTVPGYWFTVAFIDIVGRFAIQAVGFLMMTAFMLGLAVPYRQWTRPGNQTGFVVMYALTFFFANFGPNATTFIVPAEIYPARLRATCHGISAASGKVGAIIGSFGFLYLAQSQDPAKTAHGYAPGIGVRNSLLLLAGCSFLGFLLTFLVPEPKGKSLEEMSRETEPGAAEP

SEQ ID NO: 2909 - protein, 543 aa, Zea mays
MDMNNGWLGFSLSPSAASRGGYGYGDGGGGASASACGDGEGSCPSPAAAASPLPLVAMPLDDSLHYSSAPDWRHGAAEAKGPKLEDFMSITCSNKSSGRSLYDSCGHHDDEQASKYHEVHGIHPLSCGSYYHGCISSGGGGGGGIGLGINMNAPPCTGGFPDHQHHQFVPSSHHGQYFLGAPAASAGPPAGAAMPMYNAGGGSVVGGSMSISGIKSWLREAMYVPPERPAAAALSLAVTDDVPPAEPPQLLPAPLPVHRKPAQTFGQRTSQFRGVTRHRWTGRYEAHLWDNTCRKEGQTRKGRQVYLGGYDREEKAARAYDLAALKYWGPSTHINFPLSHYEKELEEMKHMSRQEFIAHLRRNSSGFSRGASMYRGVTRHHQHGRWQARIGRVAGNKDLYLGTFSTQEEAAEAYDIAAIKFRGLNAVTNFDISKYDVKRICASTHLIGGGDACRRSPTRPPDAAPALAGGADRSSDAPGDQAASDNSDTSDGHRGAHLLHGLQYGHPMKLEAGEGSSWMAAAAAARPVPGVHQLPMFALWNDC

SEQ ID NO: 2910 - protein, 224 aa, Zea mays
MAGSFMPHSVGGADGGVSGSANVKSLFPSSSAASTTPTQDEYRGSPPDLLSRTTTNHQPQELCLTLQSANSHQAHQQQQQFFGHVSPNQHGMISGAAGVQGWAAEHGQRMPSWQHASENGAGAGNGGDSYMFGVPPRQGGLDHQGGQLFSQGEPLQSSGGWPSAARTWLDPLAAIHQQPSAMAGQVGFSHLVGAGGGFMGFLAPPAAAQRLQGQEEQGSEAMRE

SEQ ID NO: 2911 - protein, 234 aa, Zea mays
MPHSVGADDVSGSGSGSGSGNVKSLFPSSSTTSTTPTQDEYRGSPPDLLSRTTSSNQPQELCLTLQSTNNHHHQQQQQQQIFSHVSPNHHGSMISVAGVQGWPEAHGQRMPPWHAPENSGAGDDGRGAAGNGDSYMFGVPGPRQGLDHLQGQLIFSQGEPLQSSGGGWPSSSARAWLDPLVAIHQHQPSTMSGQVGFGHLVGGAGSGFMGFLAPPAQRLQLQSEDEQGSEAMRE

SEQ ID NO: 2912 - protein, 702 aa, Zea mays
MDSATSGAMELVAALLRGRVPPELGGDGAEGRALVATLAAAVLGAALFVLWRRAAAGKKRKREAAVAAAEATQAKARGGKAAEEEKPADDGRKKVTVFFGTQTGTSEGFAKALAEEAKSRYDKASFKVVDLDDYAAEDEEYEKLKKEKLALFFVATYGDGEPTDNAARFYKWFTEGNERGVWLNDFEYAVFGLGNRQYEHFNKVAKVVDEILTEQGGKRLVPVGLGDDDQCIEDDFNAWKEALWPELDRLLRDENDASPGPTYTAAIPEYRVEFIKPEEAAHLERNFSLANGHAVHDAQHPCQANVVVRQELHTPASDRSCTHLEFDIAATGLTYETGDHVGVYTENCPEVVEEAERLLGYSPDTFFTIHADKEDDTSLSGSSLAPPFPSPITVRNALARYADLLNSPKKASLVALASYASDPAEADRLRFLASAAGKDEYAQWVVASQRSLLEVMAEFPSAKPPLGVFFAAVAPRLQPRYYSISSSPSMAPTRIHVTCALVRETTPAGRVHKGVCSTWIKNAVPSEESKECSWAPIFVRQSNFKLPADPSVPIIMIGPGTGLAPFRGFLQERLAQKESGAELGRSVFFFGCRNSKMDFIYEGELNNFVEQGALSELVLAFSRQGLAKEYVQHKMAQKASEIWDMISQGAYIYVCGDAKGMARDVHRVLHTIVQEQGSLDSSKAESFVKNLQMEGRYLRDVW

SEQ ID NO: 2913 - protein, 1335 aa, Zea mays
MTCFCCGVQDRGAIRGETAMTAEGTACNGAGEAPKAEFVPEKVVTASLEEKAAGEREGEDVGGPFVVVNGGDSDGHSDRGSDLGKASGEESSSEEEDVPGSNVAPDLAVGGDHGSARGEVSAQGAALGASSADGSGRASDGAEGGADEGKGEPSSDFDAEAAPQEDVGEEDGGAAALASSGCEPAITGADSEAAPAVDDEVEGKEGTVDGSAVADVAEAVVHQEVSTEHDDALTLPKSSASMESEVIREDNKEQSTADIVGPHEQGTCGASALVENEHLCADMRADSFVAVTEPDSQEDYAVESCMRDDVLICTESGSADIESEVNGKDSKQEQSNADVVEVIGQGVVRADALMANGHLCADIQADSSEAATKPDNIANESKLTEVAESGEDAAASGELDAIDASSQTNGHIYVASGADSFIIASESKSHSFETDGQETDQQEEEVPQTEAELLDGVLKPTERNCARSVEELIGEEVDTDGHPSVDGTADASGEQEAKPMQVEGEATCGILEFEEVDKDGEDSLCNDCMVGVVSSNEETELPMKERTDEAVPSVNVGESEQVTEDTSQDIMQGGLARGVFIGTIFVKPVSDPHVESSLVHKVKAEVHLVDEITAADLKAENMVEVKRTDREVDEIEVKAPGTHEIGNSSEVEPKEEFEMEVDDAVSLHEAAASASENGSEEKSSNIAVDQVEPVNLNVDELAVDDDQPSFNPGYGSAKSSDVAETKNVEAQVTEQKGNAHHASGEWHGDHTQVIGPQRIYIIKVPKFAGDDLWDKIQAAQAHLDQLTQERDAINRRRQKQKAICDEYREKFEAARQEEREARAAHGDKKNDLNSVRSVLEKLHQANSVEELDELIAKKERIMQHETISLKEEKLLIKEINELKSQRKQLSATMGSKAEINEAFDQKDHIHERHKVLKKDSDVLFSNLKVLEENTRKIQKSFADERTALRKLTEEHRAANEIRQKAYSDWTELRSEPSKKNEYFFKYRDARNAAENFRANGDINGLISHCNSQIERVMEIWNKNEDFRKQYVESNKVSTLKRLGTHDGRKLGPGEDPPVIPSRRPSNICPLSASSPEMITLASTPAPVLAAAAAVPSKENSFPALAAPQTSKRAKSKASGSSAQIKNKSVIVSEEEDLEQTLKEKAHQLELARKAEELDRKAEELARKEEELRKERDAAEKERLRMEQKAKAKEAEERKRRKAEKDKERAEFKARKEAEEREKKKAKRDKKKGAAPADSSAIGDSHAAASATADTDSNASDNPREADVSQPAVAPRRPARPAAAIKQLNRLQPMPAPLRNRGRRKLRQYILIAAAVLTVLALFVAGNYIPRLRSHS

SEQ ID NO: 2914 - protein, 480 aa, Zea mays
MFHHQQELLQAEAAAADRESSMSNNLTSSAPGGPNAAPAAAAATGNNNKRKRSLPGNPDPEAEVVALSPATLMATNRFLCEICGKGFQRDQNLQLHRRGHNLPWKLKQRGAGKEAQRKKVYVCPEASCVHHDPARALGDLTGIKKHFFRKHGEKKWKCDKCSKRYAVHSDWKAHSKICGTREYKCDCGTVFSRRDSFITHRAFCDALTEESAKAIGGVNAMAAPVHHHHHPMLFSPPPAHVMQQQDVLLLQEHQHHQHQQQQQEDDVMQQPPPQQCNYAMKTEMPPWPAMAYDHPLLQPLCNAAAAAAAQGSAATSAPQLPAASAHLSATALLQKAAQMGATIGGAGYTQMAGPATSATAAFGLGLPGLQNAQHHHPQQQDGGGGVMAAGLARTASSHGRGGDEGGGGGSGDGMTRDFLGLRAFSHRDILGLAGLDSSCMGAITASASMGCYEPQQQHTQPQAPQQQQSSNEPWHGMGQP

SEQ ID NO: 2915 - protein, 411 aa, Zea mays
MEVSSRLQSLLRPFLLCRSRAAGMTLQTLALCSPPPPPRIPSSFLLRTRRLPPPFPHGGPSRLLFHSTFASVSPAPAPAPGRDHLNSKEQGPPPAPLPPPPPEELASEDESYYHEHLLEVAQENQSRVVPVKAFFLCTSIDLRSLQSQNSFNVIPPTSRATNYVVLRYYDVKGDPEGFKSGVIDESHCHYMVVFQYGSIVLFNVSDHEADGYLKIVEKHASGLLPEMRKDDYAVVEKPTLETWMQGGLDYIVLRDLSIDGIRTIGSVLGQSIALDYYIRQVDGMVAEFTDINRGMEKTGTFTMERKKLFQLVGKANSNLADVILKLGLFERSDIAWKNANYAQIWEYLRDEYELTQRFGNLDFKLKFVEHNIRFLQEILQNRKSDFLEWLIIILISVEILISVYNIIQEQM

SEQ ID NO: 2916 - protein, 218 aa, Zea mays
MEKLDPNDMTIRAGPGKELKITKDTVHLILGLPNAGGGTALGIDEAVVANNLRAELGLSKEDFGVTAQQDRLRKGSDDDLSIRCFFLILFNRLLFPTASWGITNHEVLLTEQMDRFHQIDWCQLIFNDLCQAAKKWHNRSVTNVSTTIYGCSIVILLYYLDHLHDSAAPLNKRGTPRIKYFDRNIIQALTRADKGKIRKGEEAFGHCSVFFLMCQSFF

SEQ ID NO: 2917 - protein, 87 aa, Zea mays
MYKSRLQELCQKRRWASSLYEPTREGPAHAPLFHATVIVNGERFSSRDEGEKSLKEAYNLTAMAAFDNLIPLPAVALAPAAPAPPPS

SEQ ID NO: 2918 - protein, 543 aa, Zea mays
MAHPITVRNLFDAITNSTGGRLHFLIYHKYLRILNEAFCSAKRVLGGHRAPALQLSDDEVILDIHGAATTKPVLQHIGTSTWPGRLTLTNHALYFEAIGVDFSYGEAVVYDLARDLKQSVKRESTGPWGAHLFDKAVMYKSSLTSEPVFFEFPQFKGHTRRDYWFAAIKEVLHAHKFIRKYKLAGFQKAEALSVATLGILRYRTVKEGFHILPAHFKTILAFNLAEKLPKGDKILEALYGQLKQHCPRFRGGQDLGQSSSEELMLADPFPLSAYTMVTMGLLKLKEEDNAEERDFAVRDVQIGGTSSVQMALERSVGYSGRVEAARATLDQVRVEDIDTNVAVLKELLFPLIEIGKRLLALSGWEEPFKSYVFLLCFLYMAYSGWIWLMFPGFLLGSTIFMLWNKHYRHGRSVGAFEIITPPRRRTVEQLLALQQAISQLEAHVQAGNIFLLKLRSLMLAAFPQSTNRVAAALVAVAAIFTFVPLRTIVLLILLEEYTRQMPVRKKSSEKLVRRLREWWLRIPAAPVQLVKPRETRRWRSRLR

SEQ ID NO: 2919 - protein, 443 aa, Zea mays
MISNMQPPYNGAVVPHAGRTNRRFDSRNVSLREVSPKVPTGLQLGDASNLGMSDEELMEQCDMGTFKASGPGGQHRNKRESAVRLKHLPTGIIAQVVVEDRSQHKNRASALSRLRTLIALKVRRPINLEDYTPPVELLQILPLKYSVRGKDVGPQIGPNNSKFSPEMQALLDLLFAVEGSVSDAAKILGLSTGALSRLILSDDSLRTAANELRASKSHELSILISGTFMAMESQAEALDQLATDDLLEGKFALLETSSVDDDLSQLKKELSGSSLDVGEPGTAVENATICTNRRYNADYTTWAYFIAFAITQGHIMEDHSVDTNTREILEIPVLWFFFNLLWWQGAILGAYEILFVSGVLLTLGSKPTVQFFTKPKDHKCDSSEPDLCDSGCNGVQMTRPSVISKAGGLEREKDYRYTGSDGKCKFDKSKIIASIQNFSVVCG

SEQ ID NO: 2920 - protein, 370 aa, Zea mays
MATATESGSAPPVDGEVRQRGRPRGSGRGRGRGRGRGRERSQSARRSKRPRKPRPWRSASPPALEPLVPLPPGTEVEVRIDDDGFHGTWFEATVLDFAPARGYRNPARYTVKYVHLLADDEGALSEPFAPSQIRPRPPPLSSPPRFQLHDIVEAFHNEGWWSGIVVSAPDATGAGVTVSFPITREVIEFPSSLVRPRRDYVAGDWIPSRAAMVLRPNRAVKVYEVGEKVEVLRNRDVYGNSWFPATVRVVIDDLSYVVEYFDLEEGKGGSEKATEYLHWWFIRPAVEHSPSKREFQLRPGAAVEAYCDGAWSLGVVTRVVGEDEYEVGIIGKKTRLLVTKVVELLKPQYIWNGNQWRITTAKGYCASYDL

SEQ ID NO: 2921 - protein, 418 aa, Zea mays
MDGGSPMQTVLSAPGVKDKKLVSFTRNDDATNDKDAVTGLIRSIVGGATPSSPAQRTAFHVFHINTVVDLFSAWRRGLPDVRPYYAVKCNPEPALLGALAALGAGFDCASRAEMEAVLALGVPPGRIVYANPCKPEPHLEYAAGAGVSLATYDTEDEVAKVARCHPGCQLLLRLKAPDGGVSGGDLMNKYGAHAHEVAPLLRAAQRAGVGVAGVSFHVGSPVSRVDVYRGAIQAARAAFDQAVALGMPPMRVLDVGGGFTAGAAFDEAAAVIRDALDRSFRDLRPCVEVVAEPGRYFATTAFTLAARVIGRRARGAAREYWIDDGVYGSLNNVLMDHKAPRPRPLASCPRPGEETYASTVFGPTCDSQDKVVTGYQLPEMSVGDWLVFDDMGAYSTSAGSRFNGFDSSEIKIYVAYSS

SEQ ID NO: 2922 - protein, 157 aa, Zea mays
MEVFYYVVFGALAAIVAGLELGKSGKDRVATTSAFNSFKNNYVLVYSLMMSGDWLQGPYVYYLYSQYGFDKGDIGRLFIAGFGSSMLFGTIVGSLADKQGRKRACITYCISYILSCITKHSPEYRVLMIGRILGGIATSLLFSAFESWLVAEHNKVQ

SEQ ID NO: 2923 - protein, 226 aa, Zea mays
MHRSFLLVCALVATALSTDTTVAAAQSQSQSQSQRSWAELSGRDNWDGLLDPLDGDLRRAVIRYGELAQATSDAFIGDPASPYAGASRYAPGAFLRRAQAPDPDAYNVTRFLYATSSARVPGQFITRPAPPGAWSAESNWMGYVAVATDAGVARLGRRDIVVAWRGTKRAVEWANDLDITLVPAAGVVGPGPGWSQPAVHRGFLSVYASRNSTSRFNKQSAREQVI

SEQ ID NO: 2924 - protein, 484 aa, Zea mays
MCRSIHQSPQRPARSCCPQATSSSSVRRPCVVAASMQQRVSISRYYIRTSPVVPMATTPHHHKHSQPAITDHSISSLVYRTAPHPRARRRSPASTYICLAARAKLAEMARALPLVLAASVLLAAAALLLAAAPAPAAAVDFGAEDLASEEALWALYERWRGRHALARDLGDKARRFNVFKANVRLIHEFNRRDEPYKLRLNRFGDMTADEFRRHYAGSRVAHHRMFRGDRQGSSASASSFMYADARDVPASVDWRQKGAVTDVKDQGQCGSCWAFSTIAAVEGINAIKTKNLTSLSEQQLVDCDTKANAGCNGGLMDYAFQYIAKHGGVAAEDAYPYRARQASCKKSPAPVVTIDGYEDVPANDESALKKAVAHQPVSVAIEASGSHFQFYSEGVFSGRCGTELDHGVAAVGYGVTADGTKYWLVKNSWGPEWGEKGYIRMARDVAAKEGHCGIAMEASYPVKTSPNPKVHAVVDEDGSSHDEL

SEQ ID NO: 2925 - protein, 321 aa, Zea mays
MPSPLGGRIQFGPGKAGMPSASLARRLLSTISSPAIPSRSTSTSASNSNSCGFSTRRARKKRSCVSWTVSAATPADMATNSGSALAKLAPLEAILFDIDGTLCDSDPIHFCAFRELLQQAGFNGGVPITEEFYSANISGGHNDDLARSLFPGMDHQKAMRFMDDKEAMFRKLAPGQLKPVDGLQELCGWMEGRDLKRAAVTNAPRANAELMLSLLGLTDFFPVLVIGSECDRAKPFPDPYLKALQLIGASPQHTFIFEDSASGVRAGVAAGVPVVGLTTRNPGKVLKDAGASLLVKDFQDPELMSVLQQVEVEPAAANAQG

SEQ ID NO: 2926 - protein, 108 aa, Zea mays
MQKSGVRSGPTGAEATHTGTRNKMREENPGPKTSTPVPSPPPARNNHLFIIAWPAMRAHPSWQRPPPLGCHIFFLFFTCCSLPRLFQAAYLIDLLIIIEIDPIIISAR

SEQ ID NO: 2927 - protein, 271 aa, Zea mays
MDRRQGEASTAPPPLSPLNRASGRKKFGRAKEAAEKACKRPRGNPIPIPIPASRPPLPSALPCPAPLCFTFHSIPSHFAAPPSVLAAPSCFHPRQRQGQEETTVATGALHRRMSDRELRPLRSIRITGDGRCLFRSVAYGACLRRGKHAPSDSAQKELADELRAKVADEFVKRRGDTEWFLEGSFESYVRQMRKPHAWGGEPELFMCSHVLRMPITVYMYTGSSDGPRIIAEYGQEYGKDDPVRVLYDGYGHYDALQPSLVRTQSSRLRGV

SEQ ID NO: 2928 - protein, 462 aa, Zea mays
MVNEQTPQRHCGSSIARQAHLIPLSPHLCNCKQSSGLRIRITLTTASACRRPVVTSREPRLARNKQPPARHDAREERLHAGPRRAAPFRLPLAGGLLPGRALRRVAGVGRLPRAAHLLPPGRARVRVRPRALAQPRRRRRHAPHVLRGQPRVSGRRPRGRPRPPPPSPPAVRQGRATGAAGAARDHPVVQGPACVHRRRRGGRRRRRRRVRGGAGAALRPVQLCRRRLLAGAPAVPGQGPRHRPPRLGPPQRRRRRRVRRQRRQRERRRRREFGDVGERRGPLRHRDALQEDDRGGPLQRPLSQELRTVPVPGKQQQQQHLLLAFYRQFGVLDDAQISYTKFLILLLTAAPTCAAHWIGSQVKGDYRRADEYYSRAILADPDDGELLSEYAKLVWEVHRDEDRASSYFERAAKASPQNSHVLAAHAAFLWDTDDEEGGADALSYAAFAQPAHSSLASATATT

SEQ ID NO: 2929 - protein, 844 aa, Zea mays
  misc_feature (89)..(116): Xaa can be any naturally occurring amino acid
MSPAAGEQLSGAHREGRAVEARRVFIGAGCNRVVNNVSWGACGLVAFSTQNAVALFSPLRGEIVTTLPGHKAPVNCTLWLPTKKDVLHXXXXXXXXXXXXXXXXXXXXXXXXXXXXLQWFHALQLPGMHKKGITCLAGRMVSDTIAIFASTSSDGIVVIWEMAIEPTTGGDCKVTCLHSLSVGLKPMVSLSLAVLPGQGGYLILAMGGLDHKIHIYCGDKAGKFIKACELKGHSDWIRSLDFSLPVMMDGERHNLFLVSSSQDRTIRIWKMTSEAAASGSSLQLRKETIEMTSYIEGPLFVAGSTSYQVSLESLLVGHEDWVYSVEWQPPTLLTGDEAHQPMSILSASMDKMMMIWRPEKTTGLWIDSVTVGELSHSALGFYGGLWQPDGRSILAHGYGGSFHMWRDVGLDSENWQPQIVPSGHFAPVSDLTWARSGQYLLSVSHDQTTRIFAPWRNQVNPGDMIYWREIARPQIHGHDLNCVTFIQGSGNHRFVSGADEKVSRVFEAPLSFLKTLQQATLLKPDISEDFDNVQVLGANMSALGLSQKPIYTHGVKESSISNSNDGPDSMETIPDAVPTVFTEPPVEDQLAWNTLWPESHKLYGHGNELFSICCDYEGKLVASSCKAQSAAVAEIWLWEVGTWKAVARLQSHSLTVTQMEFSRNNAFLLSVSRDRHLSIFSIRKTEGGAEHRLVAKLEAHKRIIWACSWNPFGYEFATGSRDKSVKIWCVEDASSVKLLATLPQFRDSVTALAWMGRDRASNAGIVAAGMDNGLIELWSVSGGRASSGTQLSVACVLRFDPLLCHVSTVHRLRWRCSTDEKSTLELASCGADHTVRVFEVCGSI

SEQ ID NO: 2930 - protein, 797 aa, Zea mays
MAPALSRTLGPSSVAALRPSPSCRGLLRAALAPQGRGASARCAVGVRWEAARRRRMAGVRCDAAVAEKPAGEEETAGEKYEYQAEVTRLMDLIVHSLYSHKEVFLRELVSNASDALDKLRFLSVTDPSVLADGGELEIRIKPDLEAGTITITDTGIGMTKDELKDCLGTIAQSGTSKFLKALKENKDLGADNGLIGQFGVGFYSAFLVAERVVVSTKSPKADKQYVWEAEADSSSYVIKEENDPEKMLSRGTEITLYLRDDDKYEFADPTRIQGLVKNYSQFVSFPIYTWQEKSRTVEVEEEEESKGEEATEESKSEEATEGEKQKKKKTITEKYWDWELANETKPIWMRNPKEVEKTEYNEFYKKTFNEFLDPLAYTHFTTEGEVEFRSVLYVPGMAPLSNEEIMNPKTKNIRLYVKRVFISDDFDGELFPRYLSFVKGVVDSNDLPLNVSREILQESRIVRIMRKRLVRKTFDMIQEIAEKDGKEDYNKFWESFGKFMKLGCIEDTGNHKRLAPLLRFYSSKNETDLISLDQYVENMPENQKAIYYIATDSLQSAKTAPFLEKLVQKDIEVLYLIEPIDEVAIQNLQTYKEKKFVDISKEDLELGDEDEDKEKESKQEYTLLCDWIKQQLGDKVAKVQISKRLSSSPCVLVSGKFGWSANMERLMKAQTLGDTSSLEFMRGRRIFEINPDHPIIKDLNAACKNEPESTEAKRAAELLYEAALISSGYTPDSPAELGGKIYEMMTMALGGRWGRLETEEAEVIASIDDADSSEGATTTTEVVEPSEVRTESDPWKD

SEQ ID NO: 2931 - protein, 414 aa, Zea mays
MAHTSCDGVHHVISVAHGETASTSTSHQDMCSDSDEPHQEDRLSTSTQTLSSESSPSISPTAYSTRNLSFPRRDSIYGHGRSPWNSGLWISFEIVMYIAQVVAAIVILIFSRHEHPHAPLFAWIIGYTLGCIASLPLIYWRYVHRNRHLDQEPQQPPTTYPTLTPSQSSEGRNHRTSGIVLHLGCISISCPRLSVLAYHFKTGVDCFFAVWFVVGNVWIFGGRSISSDAQDAPNMYRLCLAFLALSCVGYAIPFIMCAAICCCFPCLISVLRLQEDLGQNRGATQELIDALPTYKFKPKRVKNWGIDHASSSEHLDEGGILGPGTKKERVVSAEDAVCCICLTKYGDDDELRELPCTHFFHVQCVDKWLKINAVCPLCKTEIGGVVRSFFGLPFGRRRVDRIAARGVASSRFSV

SEQ ID NO: 2932 - protein, 664 aa, Zea mays
MEDYPEELRTPPVSLVSIVGCPELHPSISAALSSQQPPMNTLALPDFAKVSILARSGKPRDPLAPPHPPAGILKKDWLLKHRTRAPAAVAALFRADQVSDDPAQWLKACSDLENLKSAIQRKNTKLLVVLVQAQASDELSEDVTVALRKRAEIDSNHLVVLVEHDEAEWNRSLNKSVAIYAEFRRDWPEALKFYEEGVRVLREMIGTSTRLPPTQRLVEIKAVAEQFHFKISTLLLHAGKAVEAITWFRKHIRSYARVLGTPEVAFLHWEWFSRQFLVFGELIETTSTTIPDTLSPRFGTADYGLTEWEFQPAYYYQLAATYLREKRYAIECSSSMANLTTEVNGVPESVMPSVYVGQYVRLFEQGDTVSILPLSDTEYTSYALSEAERFQDSYEIIALFRKAYESFQSLGATRIASVCSGGMAMEYYAAGDFSNAKQLFDNVAGLYRKEGWTTLLWENLGYLRECSMKLNSPKDFISYSLEMAALPLFSRSEEENRENKIKSGPAGSPTISRRENIQQEVINVLERNQSSEGTDDGFNNAMEEVTHLDIDQISSLRMVLTTSVAFLDQSVKPGSPLLVSVSLLSHLPSPVVVDQLEVQFNQSDCNFVIHSRQEDSPPFYSNLHDQVVQDTSLTLFTNRWMRLTHEAKSGTNVMIRNLDNTSFH

SEQ ID NO: 2933 - protein, 101 aa, Zea mays
MAVRSHIYIYITVTKSTAAAKHAGSRGGEFVRTCLDTPLDDGRPPRPPPCGTAARKALRGRPRGEQSHLIILMCSQFAPAGTALHRACCRRRSSSRHGLAG

SEQ ID NO: 2934 - protein, 893 aa, Zea mays
MEAVQTALSERTNPLLNRSSGPSVVTRLQPDAGNGAGFYDGAYSFLDTTKACATRFSSGSVTSDDSPAVTPRLLSLMSSSSPDNCSSSSEWPDRAAASRSNRYLFDANAQARCAGYLDLMRLEVDAQLGRLRGGVTGLESYALPGNGRAIGGAHLGMSLDVMLIEIDERFNTLKLLMGSVFRQAKEMLGSVNSSVSDLQSENELQLEVFGAIIGECVSGLQEELERKLYEQISITNTMGRNWKEAITQFAAMREDLGALYRMKDVKALSSQLSEASTELSMQMLSEEELLRQIDKVREDSARPVPLPHRRRRRYPLPPQPALGRFFPWHPALGFFLPRLPARRRPLLLPPLARCRSSPAARARCCSLQLPPQLAIAAPPVLPLPAPPASCTAAAPPLAGRAAASTLLKAKELNRTLLMGSLHALRAPTPLVGSTRIGFSSGLRFCSNRVLRGLTPIGAMKSYRLSELSDTEVSGLKARPRIDFSSIFGTVNPIVEDVRVRGDAAVKHYTEKFDKVMLDDVVVCVSDLPDAELDPAVKEAFDVAYDNIYAFHVSQKIPEKTVENMKGVRCKRITRCIGSVGLYVPGGTAVLPSTALMLAVPAQIAGCKTIVLATPPSRDGSICKEVLYCAKKAGVTHILKAGGAQAISAMAWGTASCPKAEKIFGPGNQYVTAAKMILQNSEAMVSIDMPAGPSEVLVIADKYANPVHVAADLLSQAEHGPDSQVVLVVAGDGVDLGAIEAEVSKQCNALPRGEFASKALSHSFTVFAKDMVEAISFSNLYAPEHLIINVKDAEQWEEFIENAGSVFLGQWTPESVGDYASGTNHVLPTYGYARMYSGVSLNSFLKYITVQSLTEEGLRKLGPYVAKMAEVEGLEAHKRAVTLRLQEVEANVTV

SEQ ID NO: 2935 - protein, 191 aa, Zea mays
MRLLQAEELFRKVLEVGSKNKAARLLGLDVGSKYVGVAISDEKNRVAMPLSVLCRTKTNINLMADDFKTLVSMYSIAGFVVGYPFKIYGQPCASAIQVSLAGELCKTGKLDDLPYAYWDENFTSKCVEALLHPLNLKDLDDAKTMTDKFAAVCILQVRTPKYQGDFALLLQISCFSTLRDRWYIVYSVKVI

SEQ ID NO: 2936 - protein, 393 aa, Zea mays
MISWPTIYHVLEETVPLYVAMIVAYLSIQWWKLFTPEQCSGINKFVAKFSIPLLSFQILSTNNPYSMNLKLIFSDVLQKSLSLLGFAVASRVCCEEKFDWLITGFSLSTLPNTLIVGIPLLKGMYGDEAVKLLSQIVALQSLIWYTLLLFLFEFRAARGMAITTSSEAIDEAESGTPGPMQQGHEEGQAKGVSARCYGAFHFLLVVSRKLVTNPNMYASLAGLIWALISFRYEHKFMNCVNLGSGMQKVISCYVWHTMISCRWRIQLPSIVNNSIRILSDGGLGMAMFSLGVFTALQTKIVACGTKRMLLSLGIRFFLGPGLMVISSYLIGMRGTLLKVAIIQAALPQGIVPFVFAKEYNVHADILSTAIILGMMVAVPVALGYYFVMDHPRL

SEQ ID NO: 2937 - protein, 309 aa, Zea mays
MPSVEVEVQVGGAGGWRPKQQQKHRHHHHPLEIRQVWADNVDREFKLIRAAIERFPYVSMDTEFPGVIHHPPPAVHHSTLTAPQRYALLKSNVDALHLIQVGLALAPSPGSPPALAFQINLRGFDPRVHRHAPDSVRLLAASGLDLAAHRARGVPARAFAALLASSGLICNPAVAWVTFSSAYDFAYLVKLLMGRKLPRALPDFLRYVRVYFGNAVYDVKHMARVASAPALLGGLERVAAALRVRRAAGRSHQAASDSVLTWDTFREMARLYFPKEGSLEMCAGVLYGLELHDDDGRGTKPRAEYALLR

SEQ ID NO: 2938 - protein, 509 aa, Zea mays
MALGQQLRVLHALDVARTQLYHFMATAIAGMGFFTDAYDFFAISLVMDLISYLYYEEQIDRGVKATINGIALCGAVPGQLVFGWLGDKMGRKRIYGVTLLLMVVTSLASGLYFGTNEASNVVAVLCFFRFWLGFGIGGDYPLSATIMSEYANKRRRGAFIAAVFAMQGFGNLAAGIVAVVVSASFLRTNPRRNANFVWRIVLMLGAVPAILTYYWRMKMPETARYTALVAKDARKAASDMSSVLHVEISPEDEAVRQDQYGLFSPQFLRYHGTHLLATSACWLAVDITFYSLNLYMKDIFVDVGLIDPPGKNHLFMRMTVTTLLHTGIALCGTLPGYFFTVAFVDRIGRVRIQLLGFTMMSVLTAILAATYAYWKRQETIQRKMGFAVLYGLTNFFANFGPNTTTFIVPAEIFPARMRATCHGIAGAFGKIGAIIGVFGFMSNMEEHGVVPRKLWALFSSNLVGLVFTFLLPDSKGKSLEEMAGETEEQQQQQDAAVVAAADHINLVPI

SEQ ID NO: 2939 - protein, 588 aa, Zea mays
MSRMAPPSPPQSLKPPTLPFSPPKKPPPMPVYKDLHFNRDLSATKKLQAGVDLVARLLGVTLGPKGRNVVLGNKYGPPKIVNDGETVLKEIELEDPLENLGVKLVRQAGARTNDIAGDGCTTSIILAQGLIAEGMKVLAAGINPVQVARGIEKTAAALVSELRLMSRVIEDHEIAHVAAVSAGNDYAVGNMIYDAFQRVGRQGMVRIENGRGTENSLEVLEGMQFERGYLSPYFVTDRGNMTVEFTDCQILLVDKKITDASEIIRILDSAVKENYPLLIIAEDVEEQAMADLIKNKLKGTIKVAAVKAFSFGEQKTQCLDDIAIMTGGTLVRDDMGHILEKAGKEVLGSASKVVITKDSTLIVTDGSNRRAVEERVAMIKGQIENSKESYNKKILGERIARLCGAIAVIQVGAQTIIEMKDKKLRIEDALNTTRAAIEEGVVVGGGCSLLRLSEKIDAIKESSLDNIEQEVGADIFKQALSYPTSLIAKNAGVNGDFVIKKVLLNDDANYGYNAAKNCYEDLMAAGILDATKVVRCCIEHAAVVAKSFLTSDVVIVEAKEGKPIRIRPPMPPRHLIPPMPASISGIRV

SEQ ID NO: 2940 - protein, 127 aa, Zea mays
MGATLLQAVASLLTRLQRAARRMAAGTAGGGGGKGSPRAQAAVAQWKKTFSSLAPASGTTTNKEAAEPGVWTKEILMGERCQPLDFSGVIYYDAEGRRLAQPPPPRSPMRSPLPASHGLAAAHARAY

SEQ ID NO: 2941 - protein, 399 aa, Zea mays
MNGSSGSQGHHVSGEKKQVCHVSRPILNNGPKHRPLTPMRRCRGVACVVIILSTAFLLVVYLAPITTFAVRLFSVHYSRKATSFLFGMWLSLWPFLFEKINKTKVVFSGENVPPKRRVLLFANHRTEVDWMYLWDLALRKGHLGYIKYILKSSLMKLPIFSWAFHIFEFIPVERKWEIDEAIIQNKLSKFKNPRDPIWLAVFPEGTDYTEKKCIMSQEYASEHGLPMLEHVLLPKTKGFICCLQELRSSLDAVYDVTIAYKHRLPDFLDNVYGVDPSEVHIHVRMVQLHHIPTTEDKITEWMVERFRQKDQLLADFFMKGHFPDEGTEGDLSTPKCLANFLTVVCLTAICLYLTLFSFVWFKVYVVASCAYLSFVTYYSILPPQLIGSPEGDVKAKKVV

SEQ ID NO: 2942 - protein, 360 aa, Zea mays
MAGAGGATAVKQPAAGAPDAGASRSGVGAGAAGAPVADPRAEALRCPRCDSANTKFCYYNNYSLSQPRHFCKACKRYWTRGGTLRNVPVGGGCRKNKRSRSSGGPGAGGRNGSSAAAAAAAAAAAVTSSSAPSTLSLPLHTGSLPSLSSALGLPGGASLASLLLGTAGSGGDHLGLFQAAMQSVVSSEATAYEMQQQQQTQVDHLLGLGYGGAGAGAGAQIHLKPWMHEAPGAGAGGIMDSFYAPLLSSSLVPGLEELHVKAEVAGAGDHQQKPAPGDQQSASWELPTPSSSNVDANVIASDALMAAAAASMNPGVSSATAATAPTVPSSFMYWGNGGIGGAAAAWPDLTNCGSSIATFF

SEQ ID NO: 2943 - protein, 245 aa, Zea mays
MDNQPLPYSTGQPPAPGGAPVAGMPGAAGLPPVPHHHLLQQQQAQLQAFWAYQRQEAERASASDFKNHQLPLARIKKIMKADEDVRMISAEAPVLFAKACELFILELTIRSWLHAEENKRRTLQRNDVAAAIARTDVFDFLVDIVPREEAKEEPGSALGFAAPGTGVVGAGAPGGAPAAGMPYYYPPMGQPAPMMPAWHVPAWDPAWQQGAADVDQSGSFSEEGQGFGAGHGGAASFPPAPPTSE

SEQ ID NO: 2944 - protein, 392 aa, Zea mays
MEGEAVHMLQSGHHQWNKGQPTLQAFPATQRLNSRLHQISEETKKMAPKLVFVLPVVLLALALQAILRPPPPKLCGSPGGPPLTSPRIKLRDGRYLAYKEDGVQRDKARYKIITVHAFDSTKDFPSPVSKELVEGLGIYLLAYDRAGYGESDPNPNRHVKSEALDIEELADQLGLGHKFYVLGASMGGYSVWGCLQYIPHRLAGAALVVPIINYWWPSFPAELSKQAFNRLIVPEQRTLWIAHNIPSLLYLWMTQRWFPSSAAAMHHPEIFSKHDMEVLQKMMAMPRTIENKSRQQGIYESIHRDLLVAFGTWEFDPMNVTNPFPQNEGSVHIWQGREDRLVLVELQRYIAKKLPWIKYHEVPEGGHMFVMVDGWTDRILKALLLGEEPLDV

SEQ ID NO: 2945 - protein, 694 aa, Zea mays
MEVEQAAEVSAPETADLNVPAKTPAHDDDKKKVPNGNTNLQVKETHNDEDDGTGSDGFELIDVKENFDSAKVGEEIAASRSTTVDTSPVTEQSETQEEKITAPEEQSVAANTRHVESSMLNQQTEQLEKLTRRIEELESEKDKLVKDLTEAENKQSMHYSSLQEAQSSLSMKDKELAEATESLKELGSELETSKKRFQEIEAELDSSADKLRKLEELKDERSLHAAQEAKRASELDKMLELAQSNMKEMEKHISSLQEEVKGHQDKATDHQQIEESLRNTISELKVVQEALELSKSQVADLEQKLASQDADISKLTEELNLHCSSEESLKENNLKLQTELTTALEDLQSKLLSLQEMETKLDEQSKDRQTSEAALEKQNEQLLILQAGLDNLKDENETLQGSLADLNSKLSEKDSLLHQAEDELAKAQLVLSEALSQKEELELNLNSLNEQHGESKAFGENASQKIIELEAQIQAMRAAEEALNLELKEAEASVKAAEKKGSDLEQQLSEIENKLVASSEEIELLKERIQQEAAVSAERGMQLEETMTSAEGYKEKINELQCSLDSSMSKNQLLEQEVKELTDKCSEHQEQAHSVQQRSLELEDLLHTSKTHAEGAYSRTQELEQELNSTYEKLKGVEEELEQYRSKASQLSDDLEAYQTKAASLEAVVEAASEKEKELMESLSQITEEKKKKK

SEQ ID NO: 2946 - protein, 378 aa, Zea mays
MPASCSCNDGSVFFFTFVVFFHAKAPSIMSERGRLAGRLIDNRSRGYHVVPLVEDPRGHPEVLVDGDRRGYSDIRGVQQRRGYPDTHLLEEPRGYPGVRVVDHRGYPGSRGVDERRAYPELHQGSRMRAAPPPYPAAFEDELELQEVELRRLSAHNRALVEERELLSREIQAGKDEVRHLNVIIADINTEKEAYISKLMDKRRKLEAELGASEHLCDEVRHLRGEIDKLVTARKELSAEAASLVEELNREQSVKQQLPVLKTEIDGLQQELVHVRTACGLEQKGNLELLEQRKAMEKNMLSMAQEIEQMRGELANFEVRPRGPGGAYGMQIGSSEVTFTKNPYEDGYNAYVGVPEKDPLHPPEYASWGTYDRSRLQYR

SEQ ID NO: 2947 - protein, 329 aa, Zea mays
MMGGFLSRVLLLAFGYAYPAYECYKTVELNKPQIEQLIFWCQYWILVALLTVLERFGDFTISWLPFYSEAKVLFFVYLWYPKTKGTTYVYGTFFKPYISQHENEIDRNLLELRARATDMVVLYFHKAASVGQNTFFDVLKYVAAQSPSRKSRLHPHQEPQQQQPQVQVELQQPQPQKQAAPVMRRGASIAARQAAMAQQSLETIPVPSSPKIKRQTSGRPGSVASTKPAAAASTPKPGGSPKKGEVKPAVDPVQTPATSADSPKSEPSAPPLSETEEVDNMAIDEVSGDAAEGAEELDPALEETPMEETIRVTRAKLRRRTATEDSAGN

SEQ ID NO: 2948 - protein, 235 aa, Zea mays
MATVTEEVAPVVTVSEEPAPEAAKEVVEKPEEGKKPDEEGDERKKADPAAEKEKKADPAAEKEKKARKPRSRKPKSAGLHHPPYFEMIKEAILSQDGGKVGASPYAIAKHMGEKHRDVLPPNYRKVLAVQLRGFAAKGRLVKVKASFKLAAAEERKPSAAAKAKKKASAGMAKRKRAAAPAKMKPAAAASAPSREARKVRAKRARKVAPAPAQPKPKPARAAASGAGKKVNKASA

SEQ ID NO: 2949 - protein, 462 aa, Zea mays
MKNVDRPPSNPKRIIIQSTQECFSVDIPRAPAGTVRPETRRAADEDDDFMPSSKKRNLDDSPGKVLKKVVTKRRKAVPPPRQQKLNVRCNPQDVLVSIQILNDRQQQAIARRGFSSILDMRLDALGSRSHLAWLMEKLDPNDMTIRAGPGKELKITKDTVHLILGLPNAGGGTALGIDEAVVANNLRAELGLSKEDFGVTALQDRLRKGSDDDLSIRCFFLILFNRLLFPTASWGITNHEVLLTEQMDRFHQIDWCQLIFNDLCQAAKKWHNRSVTNVSTTIYGCSIVILLYYLDHLHDSAAPLNKRGTPRIKYFDRNIIQALTRADKGKIRKGEEAFGHCSHKTRTNAFDVPRPDPSGQHSIHIELPLIRDLISSKLNQLPSRHRMGFIEKLSHFDAEVGKACSVIKQNLQQIVEKQFNLSDVFGELIDEVLRAEAGDNEDAYDVQKTTSKSDDILPQTAS

SEQ ID NO: 2950 - protein, 70 aa, Zea mays
MKRENHRRGREKNDNTGGEGERGERRRGGQRIEEGGGARGVGERERQRGGEACCADRVRVVAERDMRSVG

SEQ ID NO: 2951 - protein, 270 aa, Zea mays
MALAASHHGLLPFAPAATPTPSRGHLRFRAARPLPRPARRICCQSINSANVLGASSTTSDEAVPVPVVQIDQDSDRDATIVQLSFGDRLGALLDTMKALKDLGLDVTKGSVTTDSAVTQTKFHIMRFGRKVEDPDMLERIRLTIINNLLQYHPESSEKLAMGEFFGIKPPEKKVDVDIATHIVVEDDGPKRSILYIETADRPGLLLEIIKIIADTNIDVESAEIDTEGLVAKDKFHVSYRGGKLNSSLSQALTNCLRYYLRRPETDEDSY

SEQ ID NO: 2952 - protein, 849 aa, Zea mays
MEVPTYTSEVLHPTAYVSEPDSSSDNACDWVIPEYTSTPFMPASTQTEDVGSPDMSTEPLRRKHHVLRGERQAILARQNKKFEANVARNVATLTEDTISDVGQMDDSTQPGSTIEINNTVDDDDEGVIFGEDNDENEGYIFADEDTNEDFEIDGTQDLSVVTDVPDPYDKVYSNIPEETHMLKHVPDCGYCTAKKFEYEPLGFCCRGGKVELAPLETPPQLRRLWDSADSDARHFRDNIRFFNGHFSFTSLYCCLDSMTTNMRDSGIYTFRAQGMMYHNIKSFGSECGADHKHLELHFYDDDPSLEHRFRKCREDQIQKDQEVIKQIVGILRGNPYSEHLRSMGHVENLADYHIALNLDQTLNQKTYNTPLTSEVAAVWIEGSERRGQFSKSVMLHGKDRSSHGIRSYHGCYDALSYPLFFPRGELGWHANIPKVGVSMDEVDAYRATHRASNANDADAEPPTHLCVSVRDYYCYKFQIRPGVFNPILHGKRLFQQFAVDTYIKIESSRLDFIRKNQDRLRADLYRGLVDSMLDGDVRGEKVGKRTVLSPSFIGGPRDMRRRYMDAMALVRKFGKPNIFLTMTCNPNWDEIRRELLPGQTPQDRPDLVVRVFHAKLQELKHRLTKQDILGKVRAYVYVMEFQKRGLPHAHFLLIMQRKYKLTCPEQYDLLISAEIPSNKYPELRKMVIKHMMHGPCGSLNPNCPCTKGRSSCKNQYPRHFREATMQGKDSYPNYRRRDDGRKEKVRGCELDNRWVVPYNPYLLRLFNCHINVEACGSIKAVKYLFKYIYKGHDRASVVMRDASKENGDETEEKRWAHLVGARLWRRSGYLVQGGGDVSERKKLGMAMHV

SEQ ID NO: 2953 - protein, 987 aa, Zea mays
MRRLPPLPRPAAAVASTSTPDIVAELGRVLSTRRWNKGSAYKRLSPSVTAAHVADLFRAPVSPLDPATALAFFECVARRPGFRHTAASHAALLQLLARRRAPANYDKLVLSMISCSGTAEDVREAVDAIQAIRRVGGKRLVLSPKCYNLALRSLLRFDMTEYMGKLYSHLVQEGLLPDTVTYNTMIMAYCKKGSLAIAHRYFCLLRESGMQMDTYTCNALLLGYCRTSDLRKACWLLMMMPLMGCRRNEYSYTILIQGLCEARCVREALVLVFMMVHDGCSLNLHTYTLLIKGLCKEGRIHDARGLLDEMPLRGVVPSVWTYNAMIDGYCKSGRMKDALGIKALMEQNGCNPDDWTYNSLIYGLCGGKLDEAEELLNGAIARGFTPTVITFTNLINGYCKAERIDDALRVKSNMISSNCKLDLQAYGVLINVLIKKCRLKEAKETLNEMFANGLAPNVVTYTSIIDGYCKVGMVGAALEVFKLMEHEGCHPNAWTYGSLIYGLIQDKKLHKAMALITKMQEDGITPGVITYTTLIQGQCKKHEFDNAFRLFEMMEQNGLTPDEQAYNVLTDALCKSGRAEEAYSFLVRKGVVLTKVTYTSLVDGFSKAGNTDFAAVLIEKMVNEGCKADLYTYSVLLQALCKQKKLNEALSILDQMTVSGVKCNIVAYTIIISEMIKEGKHDHAKSLFNEMISSGHKPSATTYTVFISSYCKIGRIEEAEHLIGEMERDGVTPDVVTYNIFINGCGHMGYIDRAFSTLKRMVDASCEPNCWTYWLLLKHFLKMSLINAHYVDTSGMWNWIELNMVWQLLERMMKHGLNPTVVTYSSIIAGFCKATRLEEACVLLDHMLGKDISPNEEIYTMLIKCCCDIKLFGKAVSFVTDMIEFGFQPQLESYHYLIVGLCDEGDYDRAKSLFCDLLGMDYNHNEVAWKILNDGLLKAGHVDFCSQLLAAMDNRHCRIDSESYSMLTDSIREASGSVVSELRGEAA

SEQ ID NO: 2954 - protein, 498 aa, Zea mays
MASSTGSLEHGGFTFTPPPFITSFTELLSSAGDMLGAGADQERSSPRGLFHRGARGVPKFKSAQPPSLPISPPPMSPSSYFAIPPGLSPAELLDSPVLLHSSSNILASPTTGAIPAQRFDWKKAADLIASQSQQDGDSRAAAGGFDDFSFHTATSNAVRAHTTTTSLPSFEEEQQQQVEKAAVPSSNRASGGGNGNTKLEDGYNWRKYGQKQVKGSENPRSYYKCTYHSCSMKKKVERALADGRITQIVYKGAHNHPKPLSTRRNSSGGGAAEELQAGNSSLSAVAAAGCTGPEHSGATAENSSVTFGDDEAENGSQRSDGDEPDAKRWKQEDGENEGSSAGGGGKPVREPRLVVQTMSDIDILDDGFRWRKYGQKVVKGNPNPRSYYKCTTAGCPVRKHVERASHDKRAVITTYEGKHNHDVPVGRGAASRAAAAAAAAGSGALMATGGGQLGYHHQQQQQPYTLEMLSSGSYGGGGGYAAAKDEPRDDLFVDSLLC

SEQ ID NO: 2955 - protein, 546 aa, Zea mays
MSSEASSVVVADENGAAETVGVGRYVEMEKDQESSAAKSRLSGLLWHGGSAYDAWFSCASNQVAQVLLTLPYSFSQLGMLSGILFQLLYGLMGSWTAYLISVLYVEYRARKEREKADFRNHVIQWFEVLDGLLGRKKICCSRAANGLVCSPAATNFFPLGRHWRNVGLAFNCTFLLFGSVIQLIACASNIYYINDKLDKRTWTYIFGACCATTVFIPSFHNYRIWSFLGLVMTTYTAWYLAVASLIHGQVDGVKHSGPTKMVLYFTGATNILYTFGGHAVTVEIMHAMWRPQKFKAIYLMATLYVLTLTLPSAASVYWAFGDQLLTRSNALALLPRTAFRDAAVVLMLAHQFITFGFACTPLYFVWEKLVGLHDCRSLCRRAAARLPVVVPIWFLAIIFPFFGPINSAVGSLLVSFTVYIIPALAHMITFRSATARENAMEPPPRLLGRWTGAYMINAFVVAWVLVVGFGFGGWASMTNFVRQIDTFGLFTKCYQCPPPPPLPFPGGGLGNITMPFNGDGLPPTPAPSPAHYFFRHHRHHSHHRGL

SEQ ID NO: 2956 - protein, 154 aa, Zea mays
MISPRPALSPSFLAFRSGSPAASPPSSPRLHAPPPLSASFSTVATAAPGHAAASSFYDVLGLRPGASAREIKAAYRRLALAVHPDAAPHPTSSAEDFIRVHAAYSTLSDPDKRADYDRRLLLSGATVRRTVALGRSPSFPAHRSRRTWETDQCW

SEQ ID NO: 2957 - protein, 548 aa, Zea mays
MPVNHKLTPLPHRCPTLLPPTPQVSLSPPRMAATAPLTSQHHAPPPAPSRSPTSPLLPAFPALPPRHAPSTTSAHPPPVGVTPISSLSETVECASLTSSVRQGSLEVFLSLGRHDVAAAFAFVRITPQLAVSAPAPFIREAIRAAFPLITFEVLPSSFGSLLVRFQSAGDCTAAVSRSPLLHEDVAIFFERHDGRSVKQPVDVLAVLSVHGFPLTFWHEEFIRQAFQVFCSVVEVDWRCTSGLDYSSVRVVVRVEEVTSIPADLCIHDSSSGDSFVCQVKLVDSWPLPVDYGQHGTLRPYFGWPPHPVLPPPAPTPHRTTPLQPLRHHLSRNLARQLTVVPLATLQPDQSLVTCLARTLLALVLNQPHRLLLPCLPSFPIIIHKNILPLHPAPAFSAPFPPFPLTSCSTVAPAIADVEVLSPSPLPPSSLQPDPDHESSARKSRARTKRTADLAAKNKKIAPASRHSVRLRDKEPANYVDMSSKATNLKALKNELANCSNNLKAKVKRHGLLRKCTLNAADLRALAGTIALPALATAELEQALESSTC

SEQ ID NO: 2958 - protein, 1031 aa, Zea mays
MDRRSWPWKKKSSDRSSNADALQNSNHAEQEDKAPKFVQISPQTYSHLTESEEKVKVLEENVKVLNEKLSAAQSEITTKDALVKQHAKVAEEAVSGWEKAEAEASALKVQLETVTLSKLAAEERGAHLDGALKECMKQVRTVKEEGEQKLHDVVFAKTKQWEKIKAEFEAKLLEFEQELIRAGAENDALTRSLQERAELLMKIDEEKGQAEAEIEILKSTIQSGEREINSLKYELHVVSKELEIRNEEKNMSVRSADVATKQHQEDVKKISKLEAECQRLRGLVRKKLPGPAALAQMKMEVESLGREYGDHRVRRSPAKNSSFHRPMSPVPDYAMENIHHMQRDNEFLTARLLTMEEETKMLKEALAKRNSELQSSRSMYAKTTGKLRSLEVQMLTGNKHKSPSTPNMDIHFDGAFSQNGSNPPSMTSMSEDGVDDEGSCTESWTNALVSEPCQFKKEKAAKSSTTESSNRLELMDDFLEMERLACLSSEVNGNGSTVDKMKVDNVGATFAGFTERDGVKDLQSASPMSETPSNKQCLSEKSPLLNFQSRISSLLDSESPENNAGKVLDSIRNILKDIEDEADSVNVNGTHPSDGTLSSESKFAMDQDLKNAILKILDFVKLLDQEISKFQGQSPDYDGLCEKTQQFSALVDKVLSNVDVLNDIVIALSVILSETSQIKFTLLRDNSNEAESNNLDCVDKVTLLENKVQLEPVKDNVPGICPLLPHSSSDPEFEGPADARFDVKTAVKVYSPEEYEQLKSEKANLEGELAKCNKIIEETMARLSDMEKKLEDLTSKLADSEKSNSLNETQLKCMAESYKSLESRKIELENEIEALRSRIDALTAELFDERQSHQEDLVKYRDLEEKMERYEMERSSILVDEDPDNKSKQEREIAAAAEKLAECQETILILGRQLQAMRPPAESLGSSPNRQRMEEFLKDAAGTTAGEYFQKPSGQPDTDQDMLGTGNVSPISGYKTHMIPSDADVSPFPSPNTSKRPKHRSRSSSSSSFTNHQLPDKQNRGFSRFFAKSKE

SEQ ID NO: 2959 - protein, 106 aa, Zea mays
MIGRRVHADGAGTGTPGGRETFLNEIQTPPTHQFYWGLEVFNAGNQKRTYSLQVFSLFSTAVRYTGTPYLHDPVQYISRGTCETEKTKAGTCAAHSSVQSNPLASS

SEQ ID NO: 2960 - protein, 320 aa, Zea mays
MIPYPPLALWQLAITPLLRRAAFWSTPVGCFFYLPSPSPQLPGRRPLRSPAAACAAEPRAASDEHLEPAAHQPRRAPGVPGGQGERAPHAGVGALRRRAGAGAVPRALSEVAGSDAAPGQQLRRRGARRDQDHRVRPGPGPGPSRCPGACPVQAAHARLPAVAHGQELQHEPRRRGVRRGQRPAAAADGGAPRGGGLRRGAGRAPDRAHRAQDAPPHRVRQPQGRQRRGRVPPRRLRRPLRHRRLARHRPQRQGPARRAPEPRRLHRPPDRPRPRTPAPLIIRSNTSGLWCTCTGTGLHRSEARHCQTVLQLAVYKSLSP

SEQ ID NO: 2961 - protein, 447 aa, Zea mays
MHAPPLVAFAGGACPASAASSLSPWLASLRPAIVAAPARLLWFRRGALRLEAKAAWRATGGGRGPRVPAKGAVLASYMGAEEVVGPLSLLDEEELILHIRKERDNGKLPADVAINLEELYYNYRNAVLQNGDPNAYEIMLSNMTALFDRVLLDVQNPFTFPPYHKAVREPFDYYMFGQNYIRPLVDFRNSYVGNISLFHDMEEKLHQGHNVVLMSNHQTEADPAIIALLLEKTNPWISENIVYVAGDRVVTDPLCKPFSMGRNLICVYSKKHMNDFPELIEMKRRSNTRSLKEMALLLRGGSQLIWIAPSGGRDRPNPSTGEWYPAHFDSSTVDNMRRLLEHAGVPGHIYPLSLLCYEVMPPPQQVEKEIGEQRVISFHGVGLSATEETKYGDITCHTKNADEGRELFTNTLYNSVVNQYNVLKSAIFRDRGAAVSNNAISLSQPWR

SEQ ID NO: 2962 - protein, 248 aa, Zea mays
MPTIIVSVDLECSRCRAKIQRVLNRIQEKGEFCIDDIDFDEKNNKVKVTGPFDPDKLADKLCCKACKIIKQIEIVEPPPPPPPKPKEEPKKEEQAPPPPEKKEEAAPPPPAKVEPPKEEPPKEKPPPPKEEPPKEKPPPPKEEKPAPAPPKEEKPAPPPPKVVEVPYPWPYPYPYPAWPSDCCCHHGHGGCHCCSCGKAPEPAPAPAPAPPPPQYFPQYMPQPYPCNPCGGGYRIVCEEDPSYACAIM

SEQ ID NO: 2963 - protein, 324 aa, Zea mays
MVGGGRRGGAAEEVKLNTGNVFAALESLKKKKKGDKGKAAGSSSRKKHGEGAAQRQEPPQKELFWAPAPLTTKSWADVEDDDDDDYFATTAPPRPVWGTAGEPAKEEEDVDDAVRAALQEDIESDDGDLDDEVDDGPEDEPEHDAEDAPAEPAIRTAAAPAAPPKDTERQLSKKELKKKELAELDAVLAELGLSANSSSTAQDAEKKGTNQIGDAEKKEDAPAPPESKASKKKKKKDKSSKEGKETQEALDGSEETASAGPDEDTSAVDVKERLKKMASMKKKKSSRETDTAAKIAAAEAAARSARLAAAKKKEKSHYNQQPVR

SEQ ID NO: 2964 - protein, 753 aa, Zea mays
MQGSNTKSSSAEAKSNSKPDKEKKGGGGGTPPTPKDSKPRKPAVPKASAAGHGTPRAADKSPGSGSADRKAPTPKAAASRLATPPEKGKPAKRPQEQQAQLAEIREELVKAKEQLLENEKEKCRVLAELERAKKVADEANAKLQDALDVQRRAIEAQEADKLPAGESKQASIHDQQEDDDAVLRSTVEQLEKARYELADAVDAKNEALSQVDDAVRASEVKAQEVEHLIAEVTRLKGLVDSKVDGNRKKTAERIQNLEEENFALKLELQKKKAAEEKAVRLERMIDELESDVDDARNFGSKSKQLADEWQKKAQLLEVRLEEADQSNILKGESLNSAMEELDSTSSLLRDRESEVAALRDKVRFFEDEQTKLKNDIVVSGQRADAAEKEAADLWTEVEGLRLKLHTVEEEKMEALNSDKSTTLETETLNEQKNQLTDKLEANKDELEKTKKAMEGLASALQEMSAESREAQEKYLLKQDEIERAQAQVEELSLSLKNTKENYELLLDEANYEKVCLTKTVERLKAEAKSAHEEWHSKELSFVNSIKNSEEEIVAIRVQMIRTLEVVKEKERENTELQEKLQQLESQLMEANRIREEASAETIRWKENILDQENELQNIKQENDDLQAKELAASEKVKELSFQLANVKDSLINGNTKEGDNEKGGTEEDDEPVVVVAKMWENGKFADCDSSKEKDNDGDSQVDLESNKGDAGLDSNGLHSTNESSGRASTKQPQQHKKPLLKRFGGLLKKKSEK

SEQ ID NO: 2965 - protein, 101 aa, Zea mays
MVCMGDLISLCGFGTVMPPKSKKSVKGLFKGLGLFQGSSSSSSRRRELLSAVHGDEDEQHTEEQHIEEEQHNEAEQHNEEVEHVTWDQAAQHHQPWDQWDH

SEQ ID NO: 2966 - protein, 601 aa, Zea mays
MEGHEACYYGKIKNIIEITFAGNKPLALVFFECKWYDPKYYRTEFGMTQIQPEKLLQGHDTMPPKSKKSVKGLFKGLGLFQGSSSSSSRRRELLSAVHGDEDEQHTEEQHIEEEEHNEAEQHNEEVEHNEEVDHVTWDQAAQHHQPWDQWDHQREQQQAWDQWGQQGEPADNPMDDGSGGSSATRTRRSRKSHSVKPRHAIEREADRTLIMPHGDRNWEDLSFDGKGHHTQVNLTLGSLCRLHYPGIVKVSNGDTEDEVLVSTWDEYKFKKERNHTDRQGLVRNDFWLRYRLPDGEDYMGHAERVLQNNAKKLVKDAIYYAKIQATNLYFQKHPEEAGPLNKKEGSSKIYLTEDQYREVMVPWMAPVPDAYYAWCRYWASEGFQKASTHHRQCRGTNPNHKFGGDDMIRKAKRMEATSGQKPNDIEVYQEGHKGPDPNNPDQLCIQTATDRLIRTLRRTKDSSSVRSQRTGSSSRSSCSRRPNEQELEIMRMREEMRQQREFMEACNAHNQAMYQQQGITSNFPPPPQWSQFANTPVPPPQFTTPPTHIPAPGDRVTPEAGGSGSDPAAGTGFVDSLFAFPPPGGEGGSGQSSNHPSGGYL

SEQ ID NO: 2967 - protein, 389 aa, Zea mays
MVLETAGGHGRNPNGILGLLCREHFPGLVEYAGVTSPAYTFDHYAVAPDAVDRDGRQFNNKAERVKQELWDFFRCDAGYEARADVVSTTCCKKLVVDMHYEARIQAIVTYHGSVLGEKVNKKDARTMSLTADQYLQCWEKMVQRWCSADWDEAHNASRERRLLMQGPSHHQGSRSLGKYAEAWSAAHGGAPCSTFSAYAMAHKGKATSDVTYNPDDGPEAYTNPAIHSRLSEYTAMAKEVHGPDYDPRTEDIDGDVLMRVGGGKRHGRYWIADGAIDSSSTPTLSQVRARSTSASPAIRPRQDTSQHRIQQLQTQLDDERRQREELENRMAEMFVYMQSLGAAQGHAPPPPLFPAADPTEFTTPGQSTASNNPHASSSPSPNQSRCPPR

SEQ ID NO: 2968 - protein, 457 aa, Zea mays
MANGDAAVEVGGNGEQEAAARQASTFAELGICAELVEACDAMGWKEPTRIQAEAIPHALQGKDLIALAQTGSGKTGAFALPILQELLSNRQAEQSFFACVLSPTRELAIQIAEQFEALGSAIGLRCSVLVGGVDRVQQVLSIGKRPHIVVGTPGRLLDHLTETKGFSLKKIKYLVLDEADKLLNVEFEKSLDDILSEMPKDRRTFLFSATMTKKVNKLQRACLRNPAKVEVSSKYSTVDSLKQEFYFVPADDKDCYLLHVLNERLESMIMIFVRTCESTRLLALMLRNLGLKAMSISGQMSQDKRLGALNRFKAKDCNILICTDVASRGLDIQGVDMVINYDIPMNSKDYVHRVGRTARAGRSGYAVSLVNQYEAQWFVLIEQLLGKKIDQCKVDRDEVLILKGPISDAKRIALTVCPPKTSVFDSVNLLRHVCNTKYVQKDAYLLAIHFMPRYLAL

SEQ ID NO: 2969 - protein, 460 aa, Zea mays
MDCGPPDQLPPSSAPACFLNLNWDQSMAAATAGDHLDLVSSPASNSTAADGLALHGISPQPQYGGTPLSSPRKLNLSMMGQFHHYPPMGHLDQFLADPGFAARAARLSGFDGRPGGSGYGGAVPGQFGLPDAGPIGGALRELELGNGRDESSVSDPASASAEMALKAPSDGNAKKRKASGKGKGKDGPGSTAATKEESSGKRCKSAEESNGAEENSGKGKAAAQSNSDNGGKKQGKDGASKPPEPPKDYIHVRARRGEATDSHSLAERVRREKISQRMKLLQDLVPGCNKVVGKAVMLDEIINYVQSLQRQVEFLSMKLATVNPQLDFNNLPNLLPKDMHQSCGPLQNSHFPLETSGAPLPYLNQGNPLIGCGLPNGMDNSQSSMHPLDPAFCRPMSSQQHPFLNGVSDAASKVGTFWQDDLQSVVHMDMGQQSQQEMAPTSSNSYNDGSLQTVHMKMEL

SEQ ID NO: 2970 - protein, 519 aa, Zea mays
MAAFWLLLLFVASAVLVLRTWRAQSFVNKARQAGPRYPPGLEPYPLIGHLPQFLANRHRVLDWMTEALARQTTTCTFVLRRPGGVRGAITANPANVEHFLRTSFDHYPKGPRFASLLHDFLGRGIFNADGEAWRAQRKVASHEFNTRSLRAFVARCVHAELHGRLLPLLRRAAASGSPLDLQDVLERFAFDNICRVAFDHDPRQLPDDGDDTADSSFADAFRDAANLSAGRFRYAVPGFWKIKKALNLGSEKRLRESIAMVHDFADRIIQSRREEMLSAGFEKHDLLSRFMASQDETYSESKVPLRDVVISFLLAGRETTSSALTWFFWLLSSRPDVQRRIREEVAAVRARRAQDDVDSVVGFDLDEIREMHYVHAAITESMRLYPPVPVNSLLAETDDVLPDGTAVRAGWFVAYNSYGMGRMESVWGDDAREYRPERWLNPRDGTFRPDSPFRFVAFHAGPRLCLGKEMAYIQMKSIVACVLEELDVAVDGAYRPRQVASLTLRMADGLPVTVKQRRD

SEQ ID NO: 2971 - protein, 164 aa, Zea mays
MLSRRGRQPALLSPAKEPPPPPAPLAACMCWSTSSRRCSPLLSCAMSHSSSPRVSTIFTLRALCGRRHPRSHGHHLLHQLLGDGVHTHHLVAVLLLLPKQLAYPSYLREALFLLRQKHAPVTPLGGRVEAVAHGLANGRKGKRRQPQKRCEGPSFGWCVVTSEQ

SEQ ID NO: 2972 - protein, 319 aa, Zea mays
MADADLTPNHSLLLKMPAASAHAHSPSLSSLLLYGQESHGEAAPANANANAAAATVEDAASLETSSAVVDSASPMERKRKATAEDSAAISSPQPKDCKQESKSRRGKRPRKETEEKSSTDEDEASKGYIHVRARRGQATDSHSLAERVRRERISERMRMLQALVPGCDKVTGKAMVLDEIINYVQSLQNQVEFLSMRIASMSPVLYGFGTNSEGLHDHHAPKMGGVSFQEAAIAVPAGPAAAVSQASSRPAPSEATMNTACTTTPYSVSLQAQASISFSPSQENGGTYYLVQQAVGEQATRQEELLLSQLVFSNMCSFQ

SEQ ID NO: 2973 - protein, 600 aa, Zea mays
MCSGPRKPSTPPLPAATAKDSSAMAVLLELAAADDVVGFRRAVEGDKAPALDDAGHWYGPSAAAAGRLRLRLEARTPAMVAALYGSTAVLAYVLSAAPAEAARASPTDGATPLHLAAAGGAPGAVAAAHLLLAAGASADALAFSGLRAGDLLPRANAAADRDRALRVLLKSPAASPSSSPKKSASPPPPTAAAAAPEPRKEYPPDLTLPDLKSGLFSTDEFRMYSFKVKPCSRAYSHDWTECPFVHPGENARRRDPRRFSYSCVPCPEFRKGGACRKGDNCEYAHGVFECWLHPAQYRTRLCKDEVGCARRICFFAHKPEELRAVNPSAVSVGMQPTVSSPRSSPPNGLDMGAMLNPAWPSSPASRLKTALAAGRELDLDLELLALDQYQQKLFDKVSSPRAGWGGGMGSPLPAAAPSTRAVPDYADLLGSVDPAMLSQLHALSLKQAGDMPAYSSMADTQLHMPASPMVGPNSAFGLDHSMAKAIMSSRASAFAKRSQSFIDRGGRAPAARSLMSQQPTAGAPSMLSDWGSPDGRLDWGVQGDELHKFRKSASFAFRGQSPAPAPAPAEPDVSWVNSLVKDGHAGDIFAQWSEQEQMVA

SEQ ID NO: 2974 - protein, 488 aa, Zea mays
MALADGEADYSSWDSDDEYQKFIQNMNPPRVTIDNTSCPNATVIHVDSANKYGILLEVVQVLTDLKLIVKKAYISSDGGWFMDVFTVTNQSGHKITDESVLQGIKDYIYKSIGPDSCFLPSRRRAVGVEPSSDHTLIELTGTDRPGLLSEVSAVLTSLECNVVSAELWTHNGRAAAVMQVTDRESGLAVSDAERVGRIKGRLYNVFRGRSRDAKTAVATTGATHPERRLHQMMFEDRDYERRGKDDGRAAASGSNPGPVVSVVNWLQKYYSVVTVRCRDRPKLLFDTVCTLTDMQYVVFHGSVDTEGPEAYQDYYIRHIDGCPVNSEAERKRIIQCLEAAIERRVSEVTQQHASIKHICDYFHFFFFIIDCIYMHLQGLKLELSTGDRVGLLSDVTRIFRENGLTVTRAEVSTRGDEAVNTFYVRDAAGSAVELRTLEAIRQEIGQTVLQVKGHPEQPKPPVAAQDSPTRFLFSSLLFRPRSLCNLGP

SEQ ID NO: 2975 - protein, 200 aa, Zea mays
METEQQGVVAGVKPTLAKGTPSASFRLRNGSLNAVRLRRVFDLFDRNGDGEITVDELAQALDALGLDADRGGLAATVGTYVPDGAAGLRFEDFDRLHRALGDAFFGALAGQDDAAADGAGAGEDDDEQEMREAFRVFDVDGDGFISAAELQEVLKKLGLPEASSMANVREMICNVDRDSDGRVDFAEFKCMMQGITVWGA

SEQ ID NO: 2976 - protein, 351 aa, Zea mays
MATSGEQSAGGGSAARASKLRYPLRSASKGKAAAVSPAADAPPTTISAPRRVKPSSDVSKSMCLDLSVKDKSVKPPRRHSIQTKPGASPRPIPSGTVTPVSGVRSKRSDGQGRFDTPTSEVSMSMSRRKFSTLSSISYWMTQIRLAEAASKHSVSLGFFKLALESECEPLDRMREELKSYVVRHCLATELEDPVKDILQVYDIVDDFEKLKISAEPSEQQKKSEKAARNVSNVSANCNLKPRSLNSGATESKEAGKKEGIQKAKPDARVRGSNNRNPVKCTTAKEVVAKNTGKKTKKEAKGQEEVSNGDSDASSALPDQESVDVVKEITHEDKENMDENEMAMDVAIAQEF

SEQ ID NO: 2977 - protein, 225 aa, Zea mays
MPMEQASRHCDKDTLKMAMLKHEETFRQQVHELHRLYRIQKLLMRDLTRELKLKSQRSLPTTSPNGSCAEYSRGALGMCAYERLYAALGRGGHVAAAATPTPTPRTALGLDVVAPVVEYVRSAEEEDDDDRAEETDEDAELELTLAVGGGGAKKRYDEYPSGGESLSSSSTESDVLTVSGREWRRARGTPYHKMRPATGLDVVQVEDDVGVPPPLLFHWLSLKMA

SEQ ID NO: 2978 - protein, 279 aa, Zea mays
MNMFDGMERAGYGGGAGPMGGVVLSRDPKPRLRWTPDLHERFVEAVTKLGGADKATPKSVLRLMGMKGLTLYHLKSHLQKYRLGKQTKKDTGLDAGRGAFAAQGINFSTPVPPPSIPSTASDNTGETPLADALKYQIEVQRKLHEQLEVQKKLQMRIEAQGKYLQTILEKAQSNLSYHATGAANLEATRSQLTDFNLALSGFMDNVTQACEQNNGELVKAMSEDGLRANNLDFQPYHGVHDGDDVKCATDEGLLLLDLNIRGGYGHRISTDLKMNQHMR

SEQ ID NO: 2979 - protein, 377 aa, Zea mays
MATAYYERPRGGAVEEADDFDEFDPTPYGGGYDLAVTFGRPLPPSEETCYPCSAPSTSYDAPHYAASEPSPYGHHAKPKPNYGFRPQQEQQPSYGSGYGSRPEPAAEEGGGYGSGFGSGYGRKKQEEESYGSGYGRKPQAEESYGSGGYGSGYGGQTRPEESYGSAGYGSANPQAETYGSGYGRKPQVEESYGSEYGSGFGRKPQIEESYGSGYGRTPQVEESYGSGYGRKPQVEESYGSGYGSRPQGGEEYGSGGGGYGRKAQEETYGSSGYGYGRKNEEQSYGGSGYGYEKKASEEDEGAFGSGGYRKPKPYDEETQGSYGYGEEQPKYQSGGYERPSYGGGEGYYGRKKDDDDSDDEKKRRHSKHHHHGHHYDD

SEQ ID NO: 2980 - protein, 780 aa, Zea mays
MAAAKEKASVCCRDAPARVAGAPVVPMRAIAASPVGKVVALAAGGGERVSASAAGSSGAVIEEIAAVQPTTAKASSKGIPIMTRAQRCHPLDPLSAAEIAVAVATVRVAGRSPEERDSMRFVEAVLLEPEKNVVALADAYFFPPFQPSLLPRSKGSAVIPSRLPPRRARLVVYNKQSNETSIWIVELSEVHAATRGGHHRGKVISSEVIPDVQPAMDAMEYAECEATVKSYPPFIEAMKRRGVDDMDLVMVDAWCAGYYSEADAPSRRLGKPLIFCRTESDSPMENGYARPVEGIHVVVDMQNNAVIEFEDRKLVPLPPPDHLRNYTPGETRGGVDRSDVKPLIINQPEGPSFRINGYFVEWQKWNFRIGFTPKEGLVIYSVAYVDGSRGRRPIAHRLSFVEMVVPYGDPSEPHYRKNAFDAGEDGLGKNAHSLKKGCDCLGYIKYFDAHFTNFTGGVETIENCVCLHEEDHGILWKHQDWRTGLAEVRRSRRLTVSFICTVANYEYGFYWHFYQDGKIEAEVKLTGILSLGALMPGESRKYGTTIAPGLYAPVHQHFFVARMDMAVDCKPNEAHNQVVEVNVKVESAGTHNVHNNAFYAEEKLLKSELQAMRDCDPSSARHWIVRNTRTVNRTGQPTGYRLVPGSNCLPLALPEAKFLRRAGFLKHNLWVTQYKRGEMFPGGEFPNQNPRIHEGLPTWVKNDRPLEETDIVLWYVFGLTHIPRLEDWPVMPVEHIGFMLMPHGFFNCSPAVDVPPSSSDADVKEAESPKAIQNSLISKL

SEQ ID NO: 2981 - protein, 777 aa, Zea mays
MRSVSRARFCTTGLPSDVVFEVHDMTFHLHKFPLMSKSLKIHRMLSEQEDQRPTRGRRQRRRQVRSSDGDDDGAAETEIEEEEAEPEQQQVRTEGEGDGQPYCIAFPDFPGGPGTFEAAAKFCYGVRVDLTPWNVAPLRCAAEYLEMTEDHAEDNLAARAEAYLDQAVLRHPGDATKALKSCEELLPLAEDLGIVSRCVEAIAARSSSASRSWFDDLAVLGLRMYKRVMAAMAARGDVRAEARESCLVSYARGTIPGLSRSMRRRLASAPVSSEVEQKELLEAVVASLPADKCSGRVVTAKFLFALLRTAHILRASDAARAALERKAATQLQQAALEDVLIPSYSGTAETLYDVDCVQRIVRYFLAEEELGGEASSSAAIEEEEAVAVARPSAVVMVQVGKLVDNYLAEVASDANLKPAKFCDLALSLPDHARIYDDGVYRAVDIYLKVRARSPRNMSSTLKGQRKYVSFRAVTLTPKDLRLFWPPTDWLLKFAGAPAADSGGAGPGGGRGGLPEADGGGVHARGAERAAPAAGGPAGALLRAAAAPARHRGHAPGALRRRRSARGCGVARRDGAGAGQPGAAAGHGQHGEPGAGSGARVLQHAQGHQEDRRARRQRQRQPVPRRPQRGRVQARGGRVEGAARVQIQHAGVRLARAQRGGVQGVQDGDEPVATARAVRPSSPSGALGPDMGFLTRSRFTVTHDQRDQHGKRMAEKFQIFYRSKSQHQPLRSRTFLHLSFVDVRGVMAICSFVVRVVSPQMGVDPCELSCLCRREGGL

SEQ ID NO: 2982 - protein, 463 aa, Zea mays
MVLDLNVASPADSGTSSSSVLNSADGGFRFGLLGSPVDDDDCSGEMAPGASTGFMTRQLFPSPTPPAEPEPEPVAAPVPVWQPQRAEDLGMAQRPVAPAKKTRRGPRSRSSQYRGVTFYRRTGRWESHIWDCGKQVYLGGFDTAHAAARLGSVCLFEFASICISVIDRRVDTVKFGSSRAYDRAAIKFRGLDADINFSLSDYEDDLKQMRNWTKEEFVHILRRQSTGFARGSSKYRGVTLHKCGRWEARMGQLLGKKYIYLGLFDSEVEAARAYDRAALRFNGREAVTNFEPSSYNAGDNNLRDTETEAIDDGDAIDLDLRISQPNVQDPKRDNTLAGLQPTCDSPESSNTMASQPMSSSSPWPGYHQNPAVSFHHQRLYSSACHGFFPNHQVQERPVERRPELGAQPFPSWAWQAQGSPHVPLHHSAASSGFSTAAGANGGMPLPSHPPAQFPTTTNPFFFP

SEQ ID NO: 2983 - protein, 247 aa, Zea mays
MDSEHWISRLAAAKRYYAAQLGRVDDVPGMGTEEVEMEVEDDGDMEMELEMALELGDATWPEVACPYCYEDHDVASLCIHLEEDHPYEPHAAPCPICSQRITRDMLNHITMQHGYLFKNGHRSRRFIVPESHAISLLSRDLRGTHLQALLGGGHGHRSNNAVTTNISSDPLLSSFGLSFSASDAPEPSKSASSIPDGTAIRKETPVQPWESSIDSSLTSEEREQKRKQATGRATFVQGLVMSTLFGD

SEQ ID NO: 2984 - protein, 234 aa, Zea mays
MANRPSRSRLLVLALAAAGLLAATRAEASTPASPAPAPGPSADCTDALLGLAGCLGYVQEGSTAAAPDPSCCSGLRDVVRGEVACLCQLFQGGQDFGLSLNMTRALQLPAACKVKTPPVSKCHVSVPGVPSASPGISGSLVRGPRLRAVADAVAVNPFGITGSNREPDQRSSAFPSAFRRCRPLGTTTGLHLHRCRDSVGVPGLVSWAHSPEFMRSARTLPQSDHKSCTERCIL

SEQ ID NO: 2985 - protein, 442 aa, Zea mays
MEAHASRGRRTLEEIRQKRAAERMQHALPIAASHVDSHGNQRAGAELLARVQELENGNTELVRENKMLLSKIDEKGVEKDALVNRLNDLERNVVPSLQKNLNDISLEKDAAVVAKEDALAQLRSMKKRLKEAEEEQYKAEEDSASLRAQLNTLQQQVMGHSYSGYTMGISTEESVAMEKEIQDLQAQLKQESLLRQQEQQKLAEESQLRQQEQEKLAKEQIHIASLEAEKQQLEDQITMLTKKATEDASEFAAHKAFSMQDREKLENQLHDMALMIERLEGSRQKLLMEIDSQSSEIEKLFEENSALSTSYQEAIAITVQWENQVRDCLKQNEELRSHLEKLRLEQASLLEVSNITTKSDGQIENSISNLPEMVTENISLKGQLIKEQSRSESLLAEIMKLSAELRKAVQAQNNLVRLYRPVLRDIESNLMKMKQETYATIQ

SEQ ID NO: 2986 - protein, 213 aa, Zea mays
MVSVRISQRGGATSWILGPTFNRTHRKRGTKERTPETPRHERQDARRAGGKSRTLGRCSREDSARWRSREGAAQARPWNRKARDMGECRELAMGAVSRGAGSSGDGEGARGKREEGSQEWAPAGSRGSFGLTRGGRSEPENCRAGRSSPWESRAGGWGKLSRRSAVEQRERREKQGAQAAMAGDRVEGGRARQGELRAGARPAPWAGELTVGD

SEQ ID NO: 2987 - protein, 1615 aa, Zea mays
MSSDPPFTSHPPPPSPSTVPGPSTTISPPVSTTPTPILTLESVATAVHDLSRSMAAMQDFLLRSMYSQPAPSPTIPPPQPPLYALPHTGATATQGVPIHMLSMPASPSPIPSYAMASMGAPQYTMTTSPTPPGAAGMPLPAMFHPPYGIGANFGGVDGLGPYGSVQGGRGQFEGAMSHDTAPPPQGQGPGFGPQPPLFYKLDFPTYDGTVDPLNWINQCEQFFRGQRTPASDRTWLASYHLTGAAQTWYYALEQDEGMPAWGRFRELCTLRFGPAVRGTRLSELARLPFISTVHDYAERFNAVLCHAHNLSASQKAELFVGGLPDHIRIDVELREPQNLQTAMHLARAFECRAAGPGAFPPVRGGRSSSRPPPSGPPRQPHGLPSSGSTPSTGSSTPTRQFRRLTPAEQMERRRQGLCYNCDEPYVRGHVCQRLFYLESADYVDDTFTPEDHAGAFNHGEPGHPTVPGADAMQDSDPPPTVSLHAIAGVRTEQAMLLPVIIHGHRVVALLDSGSTTNFINVDIMHRLKLATKPRPTLRVMVANGERVSCQGVAWNVEIAINAEAFCVNCYGINLVEFDLILGVEFLSTLGPILWNFKDMCMSFTRASRSVRWTGLCSRRGQARTPTSCAIPSTPGQPLMDRLLQQFEVVFTEPAGLPPPRPYDHRIHLLPGTPPVAVRPYRYPQLQKDELERQCATMLAQGIIRPSTSPFSAPVLLVRKHDNSWRFCIDFRALNAKTSKDKFPIPVVEELLDELHGARYFTKLDLRSGYHQVRMHPDDIAKTAFRTHQGHYEFLVMPFGLSNAPATFQALMNDVLRPYLRRFVLVFFDDILIYSATWAEHLQHLGVVLNALRAHHLHVKRSKCSFGEKSVAYLGHVISAEGVAMDTAKVVAVSTWPTPSLARGLRGFLGLAGYYRKFIRDFGTIAAPLTRLLRRDAFTWDEEATAAFQALKTALTSGPVLQMPDFDKCFTVDCDASGVGFGAVLHQGAGPLAFFSRPFAPRHMKLAAYERELIGLVQAVRHWRPYLWGRYFRVRTDHYSLKFLLDQRLSTVPQHQWLNKLFGFDFDVEYRPGHLNTVADALSRRDEVSPSSALSSEGAASIHALSGPSFALLEEIRNATSTTDAAQHLFQRLQEGTLEAPWRLEDGLFLHGSRIFVPDHGDLRRQVLTLAHSAGHEGVQKTLHRLRAEFYIPSDRALVQEWVRTCKTCQKNKTETLHPDGLLQPLDVPSQIWADISMDFIEGLPKVGGKAVILTVVDRFSKYAHFIALGHPYTASSVARAFFDGVIRLHGFPSSIVSDRDPVFTGHVWRDLFKLAGVKLRLSTAFHPQTDGQSEVVNKVIAMYLRCVTGDRPRAWVEWLPWAEYCYNTSFHTALRATPFEVVYGRPPPALLPYKPGTTRTETADALLRSRDEVLAEVRQRLVQAQQISKKYYDATHREMEFKTGDWVWLRLLHRTTKSLDPHAKGKLGPRYAGPFQVLERIGSVAYRLQLPEGARIHDVFHVGLLKAHKGDPPAMPTPLPPIQDGRLLPVPVTALKAQLRRDIWYILIQWQGMTREEATWELLAEFKDLYPDFQLEDELFSQAGRDVMTGMQYKRKQQARGHAAGEGDQGWDSQQ

SEQ ID NO: 2988 - protein, 360 aa, Zea mays
MAFHRTMARCLWVGKNAAARGAGAAIPKPPAPHPPAPRSLPAVDDCPTLAFLRPKPTAVGYGTATVPLPAHCFPALPVGDHLFHRLQLDGLIPPVSTATRPPELVGVTVEQARKVARAAEMEVARARLRSNAQSVVSGSEFAALCVDIAGGVEGGRRLARALDESGVVIVLGEAVFLRPDMVAKAIGSILPVKKQLQAPRAGDGSEARKRELEAMEAQKAAIDADAAAQVRRELWCGLGLLATQTLGFMRLTFWELSWDVMEPVCFYATSLYFMSGYAFFMRTATEPSFEGFYRSRFASKQRRLMRARGFDVDRYNALRKGQGQGLVPSPTPTRVGTSAMYNSASLRPDEAAWLVPGGHT

SEQ ID NO: 2989 - protein, 246 aa, Zea mays
MRLLHKLDVSNNRLSGGFPQHILCLPSVRYVDLRFNDLRGPVPPALFDKPLDAIFLNDNRFDFELPDSLGNSPASVLVLANLRLRGCIPCSVGRMAGTLGELVALNSGLRSCLRQELGWLRELTLLDLSSNQLQGMLPESMAGLHNLQQLHVARNELWGHVPEGVCTLPALRNFTYSYKYFCSEPSRCLNVREVDDRQNCIAARFTRRVGGALASASTVVPPTPGPSRRKRRIRICGAGMWSQLLH

SEQ ID NO: 2990 - protein, 373 aa, Zea mays
MDPVADPSPSRRSLKRRPPARSPELSPKSGPGAGEAAAEGLIRRVEELEAAAARLRGEKEAAEDAARGLRQELDAERASAETAASEAMLMIERLQREKAAAQMEARQFKRYAESREDREREVQEELASLSDLAASYHSRLQSHGIDPDSFTDDDDDESYSYEEVGAEDVEQIGMAALQVERNVRDSGSGMEVKAMVVGNDRGEDEEDADADADDAEEPSSPVEKEFEYTVDVTCASTTKPATSVVAQYVGDGNSGGLYARVEALEADRAALRREIFALRAERAQLVMAREMARRLCWEMVAEQRAIVKKALVPASSFSVIRICKWVLSILFWRNRSSTAKYTFGLSTTFLGLLLLLDRSALLSSWRRLPWPQR

SEQ ID NO: 2991 - protein, 491 aa, Zea mays
MDFFTEYGEASQYQIQEVIGKGSYGVVAAAIDSHTGERVAIKKINDIFGNVSDAARILREIKLLRLLRHPNIVQIKHIMLPPTRREFKDIYVVFELMESDLHQVIKANDNLTPEHHRFFLYQLIRALKYMHSAHVFHRDLKPRNILANSDSKLKICDFGLARASFNDSLSAIYWTDYVATRWYRAPELCGSFFSSYTPAIDIWSIGCIFAEVLTGTPLFPGRNVVHQLDLITDLLGTPSFRSLSQIHSDKAREYLLGMPRKRPIPFSHKFRNADPLALRLLERLLAFDPKDRPTAEEALADPYFSGLSKLELEPSAQPISKVDFEFEGRKLTKAGVREMIYREILEYHPQMLQEYIEGGDQIHFLYPSGVDRFQRQFAHLEENYRRGVASTPPRRQPTSLPRERVCSSEDGHSQDSDSEEQRAASYVARTTISPPRSQEEGGKLQPAYQSAAAAADSCAKSYLKGAASISGASRRGIKGDNGRKEKESPRL

SEQ ID NO: 2992 - protein, 223 aa, Zea mays
MFNNLKNDDGDNNNNDDLFAMFAFGDNKKKVPAAKPAADEVGSGSGSFLVPAPAVAAVPGNKRRSSATNIMLSVSDDQSSNSYGSGSSADLVGSWSWDDDDAAAAAAAAAMTSDYTSSVLAPASYSYMQGGAPKRMRRSYGGAPPSLAHDAAMPGFGLDKVSYHYQPLPLPPYYVGSSSGSSDDASVGSLGLLQADGAPQDGASAGDIWSLDELLMLAAAGAY

SEQ ID NO: 2993 - protein, 291 aa, Zea mays
MPGQNADPCCAFHPMSRAATRFFLTRCLLPLPLLSPRWRQRRRGSICATRAFAMAASGFGGGEAFRLSAAPGAGLLKLHKGDITLWSVDCATDAIVNAANERMLGGGGVDGAIHQAAGPELVQACRKVPEVKPGVRCPTGEARITPAFELPASRVIHTVGPIYDLDKHPEVSLKKAYENSLKLAKDNGIQYIAFPAISCGVYRYPPKEASKIAVSTAQKFSEDIKEVSCSSTPPLKFSRSSRILLKFFGVHSQNTIVRGKKYRNDCPINKQSGYALLGLIRTFSSGELDKQ

SEQ ID NO: 2994 - protein, 434 aa, Zea mays
MEDNAVEEPELSGAAEFAPALVAAHPHGNSVAVAIGPELRVFDLRAGHPVSLSDDCGGHSHSDAIRAICFSVSGALFASAGDDKLVKVWKTDSWRCIQTITSEKRVSAVVISNDDLYVSFADKFGVVWLVTLREDSAEQVSVDNKPVSILGHYCSIITSMKFSPDGRFIATADRDFKIRVTLFPKNPLKGAHEIQSFCLGHTDFVSCITFTSISENQSFLISGGGDSTVRLWDYVNGCLLDTFQAKDKMAELLGPNETDDSSLAITDICPSNDGSLVAVAIQSFSGIMLLACDLVGKKLSFLKVITMEKSYIPTSLASSPSSELLWTVMGASNMPSQASSHLLTRLRIITCFQKDRLSSSDAGPATLEDGDVPHGEKLLLALQGSLDVAKQEEVLASVLAALKVSMHKMLVKKHYSEERREQRKRGRNDKKMKN

SEQ ID NO: 2995 - protein, 514 aa, Zea mays
MHGPYPTAAAAAASSSDDMAANGMKVALHRQVSGGSMKQNAELRRQASLESPRTGRATSRFLFGRQSSMDPNRRRGRSQSPVRAPEDLGVPDNLDATMQLLFFACQGDALGIEGLLRSGVDVNSINLDGRTALHIAACEGHRDVVRVLISWKANIDARDRWGSTAVADAKFYGHSRVYDLLKFHGAKVPRTKRTPMMVSAPAEIPEYELNPGEVQFRRGCDVTPGVYHIAKWNGTKVSVKILDRDGCSDQEAANSFRHELTVLEKVRHPNVVQFVGAVTQSIPMMIVSELHEEKDLSVCIQKKGKLKPQKVLRYGLDIARGMTYLHQCKPDPIIHCDLKPKHIFLDSGGQLKIAGFGVTRMSKVGTDKVRLIYHGALVDSFSYHTAPELYRNDAFDSSVDSYSFGFILYEMVEGSVRAPEDSGHSIRFEGLRPSLKGRLKGYPPDFKALVEECWHPQAMARPTFSEIIIRLDKIYAHFDKHGSWKDSLKLWSVSRRLKRIVKRRSVRSRIHNEP

SEQ ID NO: 2996 - protein, 273 aa, Zea mays
MAELSTSSDGLVDEEARQQEPGQGSAEGSHGLQDTKEQDIKKGKAALVSTELLREDLVQSAVSFLKHPKVVASSDGQRRSFLVNKGLTMDEIDEAFRRLQSPSSNSASSNMCTSQGVFDHSCRITEQEIKVDRKCMNGLERVEPEAGPVAPVVPRHPKSYMEIMEMIQRGERPDDIQDINDDPPNPDQPISEPRMAPKPKPWEKQGQGSLACDLKSLPRESDVLRSEVQHDDGTNQVTESADGANQADSLLQAGVAAGSESPGVPDDAASSLE

SEQ ID NO: 2997 - protein, 426 aa, Zea mays
MGLRGGALALLLLLFVHGGQRAAEAGGDAFVRVQGTRFVQDGKPFFANGFNAYWLMTFGADPARRGKVTSALSQAAGAGLSVARTWAFSDGGGGGGSALQYSPGRYNENTFQGLDFVLSEARKHGIKMILSLVNNYDSFGGRKQYVQWARERGQTIGSDDEFFTNPFVKGIYKNHIKAVLTRVNTITGVAYKDDPTIMAWELMNEPRCQSDVSGHAIQSWITEMAAHVKSIDGNHLLEAGLEGFYGASSARRSANPSGYQVGTDFIANNRAPGIDFATVHSYPDQWLGGLDAQAQLRFLGAWLDAHIADARAVLRKPLLVAEFGESRHDPGYSGGQRDAVFGTVYARVYDSARAGGPAAGALFWQLLAEGMDSYGDGYEVVLPQAPSTAGVIATQSRRLQGLARAFVRARKAHQGKAGKGAKGGGN

SEQ ID NO: 2998 - protein, 790 aa, Zea mays
MAPNLSKKTPAGLLGDEVAPVEGLKPSRFTLKGKDLAVDGHPVLLDVPANIRLTPASTLVPAADVPAAGGGSFLGFDAAAAESRHVVPVGKLRDIRFMSIFRFKVWWTTHWVGDSGRDVENETQMMVLDRSAGEPGGGGRPYVLLLPIIEGSFRACLEAGKVEDYVDLCVESGSSAVRGAAFRSSLYLHAGDDPFELVADAVRVVRAHLGTFRTMEEKTPPPIVDKFGWCTWDAFYLKVHPEGVWEGVRRLAEGGCPPGLVLIDDGWQSICHDEDDPNSGEEGMNRTSAGEQMPCRLIKFQENHKFREYKQGGMGAFVREMKAAFPTVEQVYVWHALCGYWGGLRPGAPGLPPAKVVAPKLSPGLQRTMEDLAVDKIVNNGVGLVDPKRAHELYDGLHSHLQASGIDGVKVDVIHLLEMLCEEYGGRVELAKAYFAGLTASVRRHFGGNGVIASMEHCNDFMLLGTEAVALGRVGDDFWCTDPSGDPNGTFWLQGCHMVHCAYNSLWMGNFIHPDWDMFQSTHPCAAFHAASRAISGGPIYVSDSVGQHDFALLRRLALPDGTVLRCEGHALPTRDCLFADPLHDGRTVLKIWNVNRFAGVVGAFNCQGGGWSPEARRNKCFSEFSVPLAARASPSDVEWKSGKAGPGVSVKGVSQFAVYAVEARTLQLLRPDEGVDLTLQPFTYELFVVAPVRVISHERAIKFAPIGLANMLNTAGAVQAFEAKKDASGVTAEVFVKGAGELVAYSSATPRLCKVNGDEAEFTYKDGVVTVDVPWSGSSSKLCRVQYVY

SEQ ID NO: 2999 - protein, 299 aa, Zea mays
MSRPRTVRIFWDDPDLTDSSSEEEGCGTRRVGRMVRELPPMAGAAAAAPVPDQCNAGDGDRGRRLGVAAPGACSGARRRLAKTGPSTKFRGVRRRPWGKFAAEIRDPWRGVRVWLGTFDTAEEAARVYDTAAIQLRGANATTNFSAAANSGSRAGQRDPATPGYESGTESSPAASSPTSVLRKVPSLSSLAEDDSCAAPCEPAAGCRSLAVLEEEELGQFVPFEDAPVYATSGFWDFEPDAGFLYAEPSSPEASWNAAAAAEPASSDDAPSWAASPVQENDYFQGLRDLFPLNPLPAIF

SEQ ID NO: 3000 - protein, 144 aa, Zea mays
MYQAIPYSAGQPWPRPAPTIGPDVAEEEGLLAASQQQASTPAEAAARVEEEEVRRAVAECPVLVVGVRGCCLSHVVKRLLQGLGVNPAVHEVAGAEADLAAAGVAALPAVFVGGRLLGGLDRLMAAHISGDLVPILKDAGALWL

SEQ ID NO: 3001 - protein, 112 aa, Zea mays
MTHEMNGSLNLCQHIYTYTEVAAAEFVVLPCPSDWSSSRLSRAQAAAGGGSVLRIHIVAVVDDNASAMSGGQPEGDAVASPPAPRVALSFPALVLDSSLEQSEPKPASEGGV

SEQ ID NO: 3002 - protein, 470 aa, Zea mays
MDRKDVGILAMDIYFPPSCVQQEALEAHDGASKGKYTIGLGQDCMAFCSEVEDVISMSLTVVNSLLKKYKIDPKLIGRLEVGSETVIDKSKSIKTWLMQIFEESGNSDIEGVDSSNACYGGTAALLNCVNWVESNSWDGRYGLVVCTDSAVYAEGPARPTGGAAAIAMLIGPNAPISFESKYRASHMAHVYDFYKPDLASEYPVVDGKLSQTCYLMALDSCYRQFCNKYEKIAGKQFSICDAEYFVFHSPYNKLVQKSFARLYYNDFLRNCSSVDDDAKEKLQSFSNLTGEESYQSRDLEKASQQVAKHLHDIKVQPSTLLPKQIGNMYTASLYAALASVLYNKHDSLNGQRIVMFSYGSGLTSTMFSLRLNNGQHPFSLSNIASVLDVTEKLQSRHETLPEKFVETLKLMEHRYGAKDFETSRDTSLLQPGTFYLTKVDSMYRRFYSQKLSEETGGGKTKCCNGLANGH

SEQ ID NO: 3003 - protein, 347 aa, Zea mays
MARKCSSCGNNGHNSRTCGGHSRTAAAFENNGGGVRLFGVQLHVGSSSPVAVAMKRCFSMECLSPPPPLPPPPAAPAYYAAALAAANSSSPSASASASSSSSLVSVEEAQAPEKMASGYLSDGLVGRAQAERKKGVPWTEDEHRRFLAGLEKLGKGDWRGISRHFVTTRTPTQVASHAQKYFLRQSSLAHKKRRSSLFDVVENAAERATTTSSRERPRLTVTDAIIATASAAAPGTTTAALPALSLGIRRPARPEYHAALPPNSLSLQLPRCSAAMGSASPSPSLALALAGPKHKHPSPSSLTAAKASSSGQAPDLELKISTGRQSEHQVQTGSPPRTPFLGTIRVT

SEQ ID NO: 3004 - protein, 487 aa, Zea mays
MAMQAAFLAGFSQLAAQPSRDCAVAVAPTRVAVAAVGSAKVGARVGLKAGIAAPAPAAGRGVRCRASLIEPDGGQLVDLVAPEEGGRRAALRREAAELPHRLRLGRVDKEWVHVLSEGWASPLQGFMREHEFLQTLHFNAIRGQDGRMVNMSVPIVLSVGDAQRRAIQADGATRVALVDERDRPIAVLSDIEIYKHNKEERIARTWGTTAPGLPYVEEAITNAGDWLIGGDLEIIEPIKYNDGLDQYRLSPAQLREEFARRNADAVFAFQLRNPVHNGHALLMTDTRKRLLEMGYKNPVLLLHPLGGFTKADDVPLSWRMKQHEKVLEEGVLNPESTVVAIFPSPMHYAGPTEVQWHAKARINAGANFYIVGRDPAGMSHPTEKRDLYDADHGKKVLSMAPGLERLNILPFKVAAYDTKQKKMDFFDPSRKDDFLFISGTKMRTLAKNRESPPDGFMCPGGWKVLVEYYDSLVPSEGSSKLREPIAA

SEQ ID NO: 3005 - protein, 545 aa, Zea mays
MPIKFALENMSTQASNRSYRYPDRTQLPYHNGNPMHVGGNGNYCVQQNHDDVNYISSDDGSQSSSSRVQDFQAQFCTLDSSSANCVYPAHSSTSSQSISGSPLSQQESHSDHAYGSSPSASCITQVPTWTLKDLENVMLGPDSDIGSPDSSFLLDTALHGNNWRELLGIQTGDLRQVIVACGKAVDENAVYMDALMSELREMVSVSGEPMQRLGAYMLEGLIARLSFTGHALYKSLKCKEPVATSSELLSYMHLLYEICPFFKFGYMSANGAIAEAVKGEDIIHIIDFQIAQGSQWMTMIQALASRPGRRPYLRITGIDDSNSAHARGGGLDMVGQRLHRMAQSCGLPFEFNAVPAASHEVVFEDLCLRSGEAIVVNFAYQLHHTPDESVGIENHRDRILRMVKSLSPKVVTLVEQEANTNTAPFFLRYMETLDYYTAMFEAIDVACPRDDKKRISTEQHCVARDIVNLIACEGAERIERHEPFGKWRARLVMAGFRPYPLSPVVNRTIKTLLDSYHSHYRLEERDGILYLGWKNRKLVVSSAWC

SEQ ID NO: 3006 - protein, 409 aa, Zea mays
MDWDAKMLPAWDLGTVVGPSSSGGGALDLKLGAPTSSRAVLTAAAGAAPALPSANPPPPPPPPSSSAPAKRPRPGLARQAVPACSVQGCDADLSRCRDYHRRHKVCEAHSKTPVVTVAGQQQRFCQQCSRFHLLGEFDEVKRSCRKRLDGHNRRRRKPQPDPLNPAGLFGNHHGVTRFTSYPQLFAASMEQPKWSVVKTEADVFQDQYYPAVHLNGAGGGAIGSHFHGKEQKHFPFLTSHSNGGGGGDVATAAALGCQPFTITTTASSESDSKQSNGNCALSLLSDNPTSAQTAMIPTTAQSLAAAMQYGGRLPGSVSVSGGGGGDVSLTGMSYMRVGDSRQASILTASSPGHAAVASPVPATTAAATPPPPPQLLQYHHGYGYYHVSGGEQGNNPDGAAVHALPFSSW

SEQ ID NO: 3007 - protein, 296 aa, Zea mays
METRRPRRGWNKRFVLPLALLCLAVLLPGALLPPSASASSSSPAAGGGSRKRRWVGFDYYVLALQWPGTICRETSNCCDTNGCCRSQPLKWFTIHGLWPQYNYGGWPSCCRPTRFNINKILMLMPILEKYWPSLYCGSSSTCFGGRGPFWVHEWETHGTCAYPEIQDEYDYFSTALYLYSKYNVTKALRKARIRPTSGRKYAVGHIVAVIEYAFGAMPSLVCKNGSVQELRLCFHKDYQPRDCTLEAGSAPNGRSYCPRYITFPSYKPSVVANTTEGINNQSNGEVPSYMRTSDSE

SEQ ID NO: 3008 - protein, 1654 aa, Zea mays
MRVPCCSLCNVRYDEEERTPLLLHCGHGFCRACLSRMLAAAPGATLPCPRCRHLTAVGNSVSALRKNFPILSLLSTSPSSPSFLHSDSGSSSDGSEDEDDFFARPSRRPAPAPAAAPPGCSFFDLASHPDLKLARRIGSGPPGPAGQEVWAGTLSRGGGVKRCKHQVAVKRVPLAAGDGLEVVQEEVERLRRASTWCRNVCTFHGAVRVGGHLCFVMDRYVGSVQAEMRQNGGRLTLEQILRYGADIARGIAELHAAGIVCMSIKPSNILLDAHGHAFVSDYGLSAILKNLTSRRVPDDSSAGIDATLLSPNYTAPEAWGPLKKSLNMFWDSANGISPESDAWSFGCTLVEMCTGAVPWAGLSAEEICKSVVKEKKPPPQYSRVVGVGLPGELWKMIGECLQFRASRRPSFQDMLKTFLRHLLDIPRSPPASPEIDFANENLPNGMQPPTTSILEMVHDNPNALHHLVCEGDAAGVRDLLAKAASERNDSLIRSLLEAQNTDGLTALHLACRRGSAELVEAIVAYQENVDILDKDEDPPIVFALAAGSPRCVRALVGRSASINSRLREGLGPTLAHVCAHHGQPECMQELLMAGADPNAVDGEGESVLHIAVARRYTDCAIVILENGGCRSMGISNSQHKTPLHLCIETWNTAVVRRWVEVASLEDIAETIDVPSPVGTALCMAAALKKEHEKEGRELVRILLAAGADSTAQDDPHCRTALHTAAMIDDVELVKIILEAGVDVNIRNAQNTTPLHVALNRGANSCVGLLLAAGANCNIQDDDGDNAFHIAADAAKMIRENLAWIAQMLLQPSPAVDVRNHRLVVRMKKFLGLCDNILTSLNNITVYYRGWTLRDFLERLPREWIYEELMETLEDKGVHLSPTIYEVADWVKFRRTVTSPAFGWQGAGPRSIGFVQSVVDNDHLAVSFCTGEAHVLTSEVIKVIPLNRGQHVQLKPGVSEPRFGWRGQSRDSIGTVLCVDDDGILRVGFPGASRGWRADPAEIERVEEYKVGNWVRIRPSLTVAVHGMESITPGSVGIVYSIRPDSSLLLGLCYLSNPWLCEPEEVEHVDPFKIGDQVCVKRSVAEPRYAWGGETHHSVGKIIDIESDGLLIIDIPNRAAPWQADPSDMEKIENFKVGDWIRVKATVPSPKYGWEDVTRNSIGIVHSLQDDGDVGVAFCFRSRLFLCSVADVEKAQPFEVGEKVHVSPSISEPRLGWLSETAATIGAISRIDMDGTLNIKVSGRKGLWKVAPGDAERLSAFEVGDWVRLKPSIGSRPTYDWNSVGRISIAVVHSIQDSGYLELAGCFRNGKWLTHNTDIEKVQTLKIGQHVRFRAGISEPRWGWRDANPDSRGVIAGVHADGEVRVAFFGVPGLWRGDPADLEIENIFEVGEWVRLTNDVEQWRSLKPGSIGVVHGVGYQGDAWDGTIHVAFCGEQERWIGPSSQLEGVSKFVVGQRVRIRGCIRQPRFGWSNHNHSSIGTISSIDADGKLRIHTPAGARAWLIDPAEVEEVEEEEVCVGDWVKVKDSVGTPVYQWGDVNHSSIGVVHRADDGELWIAFCFCERLWLCKAWEVEKVRPFRQGDKVRIRPGLVSPRWGWGMETYASKGEVVGVDANGKLRIKFRWRDRLWIGDPADIVLDDVHLLTEASNGLAFCS

SEQ ID NO: 3009 - protein, 769 aa, Zea mays
MAVLLRPAAIAGGRQVWPVAEDEEGAREAEASSQRLVEAVARGDAREAGELLAAGRADVNYAGVVWLRARRVAEAEPREDAAAEARAVHEEIRADVSPLFLAAGNGDVALVRALLAKGADVNGKVFRGYPTTAAAREGCAEVAELLVRAGASQPACEEAVVEAALQGQAALAAIFMGSDLVRPRVAAHALVSAAARGFVDVVDTLIKCGADPNATARVLLRSLKPSLHANVDCTALFAAIVSRQVAVVRHLLQAGVKRDTKVRLGAWSWDASTGEELRVGAGLAEPYDAVWCAVEYYESTGSILRMLLRSGFTSTAAHLGRTLLHHAILCGSAGAVQTLLASGADSEAPVKTTRSNRSRPVHLAARLGQPEILRMLADRGCDLNARAEAGDTAAIICSRHKREDCLRVLVSAGADVALLNSAGDSSASVASSGGWKTGFERAVIGAIRCGAVPRSSERSVFSPLMFGALCGDATAMEVLLSQPDVDVDEQDSDGCSPIMAAAKMGNVEAFRALVFAGANVKLSNKRGETAIGLAQQSKKRDLFEQVMLELALEKGMPGGFYALHCASRRGDTAAVRHLASTGCDVNIPDGDGYTPLMLAAREGHAGVCELLISYGARCDLRTPRGETALSLARAALATAAFNKAEDVIMDEMGRQAVLQGARVRKHTKGGRARPHGKSLRMVAAAGVLRWGGSSRRNVICREAEVGGSSAFQRHRQRKGDAYEPGLFRVVTATGREVHFVCQGGKEAAELWVRGIRAVTRAAFGKRGKE

SEQ ID NO: 3010 - protein, 157 aa, Zea mays
MTKLMHGSIKVNKERGRREHPSVQAKTVRDRSFYLPLHSLICKAGFHGRLLGMWVNESAANSTLAPPLSGLKDALFHPAIVVATNHDGGGGDKLNDQQQIKRKEEQTCMHDAQPRLLLLVDRSVSEHLMACSVQFLPGSREEEGRWVFDGCKEGASE

SEQ ID NO: 3011 - protein, 368 aa, Zea mays
MTLDQNHAMPMQPPALQPGRAYGAEGSAVVHGSIRTVAGGPTLALNECQILVQQKPQGDSRLLASNLCRKKRPRRSRDGPTSVAAVIQRWAERNKHLEYEESEEAKRPRKAPAKGSKKGCMKGKGGPDNTQCGYRGVRQRTWGKWVAEIREPNRVDRLWLGTFPTAEDAARAYDEAARAMYGDLARTNFPGQDATTSAQAALSSTSAQAAPTAVEALQTGTSCESTTTSNHSDIASTSHKLEASDISSYLKEKCPAGSCGIQDGTPIVADKEVFGPLEPITNLPDGGDGFDIGEMLRMMESDPHNAGGADAGMGQPWYLDELDSSVLESMLQPEPEPEPEPFLMSEEPDMFLAGFESAGFVEGLERLN

SEQ ID NO: 3012 - protein, 536 aa, Zea mays
MPSAALHLGTSVEAGGGFQGTGAMAPSARLLTPKGAGAAAGPAQAQSRREETANGGGAGPDLAALRPTTTTNRPRGKAQAGKPSRRAPIWNLKAAVFASVVLNVGLLVQHYVSSTAPSHHHHRQGHQACPMHLDAGASRDRRGRQEDPLSVPKAGAPSTGKPAVTPDSVINLDHGDPTMFEEFWRGTGAAAEIVIPGWQTMSYFSDVGNVCWFLEPGLDQEVRRVHRLVGNAAVDGYHVVVGTGSTQLFMAALYALSPPAGAGAGAAPMSVVSTAPYYSSYPAVTDFLRSGLFRWAGDASSFRGDTYIELVCSPNNPDGAIREAVLSSAGSGVAVHDLAYYWPQYTAITKRADHDVMLFTVSKSTGHAGTRIGWALVKDRDVARKMAKFIELNTIGVSKDSQLRAAKVLRAVSDAYELPEAGDARRRRLFDYGRRKMVERWRMLRGAAAASGIFSLSEETSALCNFTKEMAVTNPAFAWLRCDREDVEDCAGFLRAHRILTRSGDQFGADPRYVRVSMLDRDDAYDIFVKRLSSLR

SEQ ID NO: 3013 - protein, 1856 aa, Zea mays
MSSGAIGASDPGGGETKPVAGGDVTTSEAAGEVPAFAADVKVEGKATLATDVDREGGDTAVSDPLYANESAGMVGAEGHGDEPAEGLEAVNGEEEMLEAGARDLLTETEKNPVLVVHVPAAAAGGGSAIPEHAEAESNKVEDHVNVEPGTKNNESDNGIAHFDKEIQNNVPDDIEESSKEHEGDGAPVVDQTNNASEMLPQTGEQFPDVENSTDSNLEAASLGSVDQGARYCLPPHDKGGFQVADLVWGKVKSHPWWPGEIFDPSDASELALKHQKKGSHLVAYFGDNTFAWCDESQLKPFVTNYSQMEKQSSSDAFVGSVNNALEELSRRILSGMSCSCLPEELADNGMSYTVDNAGLKDGVTCSAVNRPEILNCFSPENLLHYIKELALFPGQGGDLLELVIACSQLTSFYRSKGCPELASFQTGDAWVEDGLDCTDTLSTQNVMVEEPVINEVHPTQDKPKRGRGRPRKQKPGGDQVVMEKRSISNQVNDTSYNEKQVGMDFDNYGNLQNKNKRNFESFEDSEKSSAPTGGSSFKIGECIRRAASQLTGSPSIMKAQNAAEGENGEFDIFSDDAGDELTVEKRAKRRSLHRNHTADPKELLSQLCLVATEPMNGYNFSVMIISYFSDYRNYIVSTTTEANIVDKGTSRRGRKRKEVLPSPDVETTDHMQDSYWSGLSLHNHPIHDLRKESPTTRPRRRRRSSSHAYVPLSELGEPVPKKQIQVMERSIIHVDEKMIDELKPTALVLSFARSASIPSELDLVKMFSRFGPLKEREAEVHRETNTVKVVFKKRADAERAFSAAGKYGTFGPSLRSYRLVSMPFSLETQSANNPVKHPENHGMEIPGSNQSEAPKDSMEVDLVQKTDEVEVAGEPSSEEVETVRQISQVQAADSTFVSQDRFDEAGNIDAELIDHVNQIGKAAQAASVSEESRDVEQVYTQKEVSANDLPTETEILNSDAITKELPQNAPDNVETDIVEDPKQSHNSRDNAVFEAVIEAPSTAQDHTEEDTGNAVPEEPMVSPELQSQTPGDLPTETETLHSDAILKKLPQNAPDNMQTDIAEDPKQSHNSGDNAVFEAVTEAPSTAQDHTEDDTGNEVPEEHMVSLELQSQTPGDLPTETETLHSDAIVKELPHNAPDNMQTDIAEDPKQSHNPGGNAVFDAVTEARSTTQDHTEDDTGNEVPEEDMVSLELQSQTPGDLPTETETLYSDAIVKELPHNAPDNLQTDIARDPKQSHNLGDNAVFEAVTEAPSTAQDHTEDDTGNEVPEEHMVSPELQSQTPGDLPTETETLHSDAMIKELPQNAPNSMQTDIAEDPKQSHNPGDNAVFEAVTEAPSTAQDHTEDDTGNKVPEEHMVSLELQSQTPGDPPTETETLHSDAIVKELPHNAPDNMQTDIAEDPKQSHNPGDAVFEAVTEAPSTAQDHTEDDTGNEVPEEHMVSPELQSQTPGDLPTETETLHSDAIMKELPQIAPDNMQVDIAEHPNQSHNSGDNAVFEAVAEAPSTAHDHTEDDTGNEVPEEDMVSSELQGQTPGEKLVGQSATEQMVGSEDPKPQAENFVAEPVVLGAVGQVEIELESKTTVEVSGEQGYSIEQTVQVEALIEASGGQLEVGRQIPEDESIACATTEHSMVVDETVEAKVVLLDESIENNAAVIGVVEETAEGETKEEASDEKGKIENNEDADKLAPAGKGKIENNEIIIDAPDEKTENKADADTPAGETKEGEITVEETDEKIESKVTAEPVIGETTEGQTAAGEPVEEARTAEDMVEDVKVLDDKSTAAEKPVENATVVAHENSTTVENTLKDAIVAPPDANTTNAEKTAIGATIETQNEDAPAERTIEDTSVEAPDVQAGASE

SEQ ID NO: 3014 - protein, 66 aa, Zea mays
MFACLMLKAFIHGNIYMNVCINKKKEEREELADDAWFSRVRVYFSNSFLLIQAGLYQIFQSTSEKK

SEQ ID NO: 3015 - protein, 263 aa, Zea mays
MLPPHLTENGAVMIQFGHQMPDYDSPATQSTSETSHQEASGMSEGSLNEHNNDHSGNLDGYSKSDENKMMSALSLGNPETAYAHNPKPDRTQSFAISYPYADPYYGGAVAAAYGPHAIMHPQLVGMVPSSRVPLPIEPAAEEPIYVNAKQYHAILRRRQLRAKLEAENKLVKSRKVLTPSPHLIAVSTSHTRSRNSLSLSVCVCVLCAAVPPRVSAPARDEESSGNRRAVPEHEAAAGVPRQRRLLGRATRARDRERRPVHEA

SEQ ID NO: 3016 - protein, 125 aa, Zea mays
MHTNPAMAKAAPPLLAAGSRTAITAQQPSSRKGAAGTGLFCSRAIVSKRTRVTAKLGDGELKPAGKRKFITKEEEPEQYWQTAGEREGENPMMTPLPYIIIFGMSTPFVILAIAFANGWIKVPVR

SEQ ID NO: 3017 - protein, 515 aa, Zea mays
MASATTSISSHPAALRDVKGDMFSLFWMLFPLYNFCSDPTFQLVKCAAPQQNSPEFEAHTGLTLLISLPSVRAAARIGGLRQQQASVAPSAAAARGQRARAVRSLRAAEPARQPVAASAAAAAPAAPVADEAAALAAVDYEALARELEGASPLEIMDRALAMFGSEIAIAFSGAEDVALIEYAKLTGRPFRVFSLDTGRLNPETYQLFDKVEKHYGIRIEYMFPDASEVQELVRTKGLFSFYEDGHQECCRVRKVRPLRRALKGLRAWITGQRKDQSPGTRASIPLVQVDPSFEGLDGGAGSLVKWNPVANVDGKDIWTFLRTMDVPVNTLHAQGYVSIGCEPCTRPVLPGQHEREGRWWWEDAKAKECGLHKGNIDKDAQAAAPRSANGNGSAGAPDIFESPAVVSLTRTGIENLLRLENRAEPWLVVLYAPWCPFCQAMEASYVELAEKLAGSGVKVAKFRADGEQKPFAQAELQLQSFPTVLLFPGRTARPIKYPSEKRDVDSLLAFVNSLR

SEQ ID NO: 3018 - protein, 879 aa, Zea mays
MRAGGCTVQQALSPEAAVVVKQAVSLARRRGNAQVTPLHVASAMLQQQAPTGLLRAACLQSHSHPLQCKALELCFNVALNRLPASASPLLGGHGHVYYPPSLSNALVAAFKRAQAHQRRGSVDTQQQQQPPVLAVKIELEQLVISILDDPSISRVMREAGFSSTHVKANVEQAVSSIEANNSASAAATKNPNPSASPPEETKPAGKLLLPLDQARDEDVAVVLDCLASRSKKRVMVVAECAASAEAPVLAAVERIKRGEALRGAQVVSVSVSRFRDLPRDEAERVLVELRCAVKAGGRAGGVVLVVEDLGWAAEFWAGRGESGRARWPSACCYYCAVEHAVAEVRALACRGGDGVWLVGYGSYQSYMRCRAGQPSLETLWGLQTLAVPAGSLAFSLNFVGDSATAMTINHQSISCKMAKCDDDRSGNGSAAPRCLSLLDAGGSGRLTAVSSFCAADCSATKCDATVKSSIPPWLQHCRDHQEPSRCKKSSTCGGSPSHHHRTALNFSTVVSPSSSVSSYEQHYHLRHQSYQPWLLVADGAREAEHPCNKARCSAAVQLHVVDDEDGKPLSAIKVKSHDSSASNGSVECRSRFKELSAENLKVLCSALEKEVPWQAEIVPEIASTVLQCRSGMARRREAAVSSSRPSSTQACAKEDTWMLFHGGDAEGKARVARELARLVFGSRKSFVSIGGSRTTASSPACWSDGSSEQQRKRPRLTEASNHGCRHESLYEAVRDNPHRVILVQDVEQGGCWRCQRDILEAIQSGLVRSRAGDDDAALGDAIVVLSCQSLDAWSTTTSPLTTKKAKAESKEEPEEEESAGDHRRKEAITAAAASPSSSLCFDLNMDVENHDTESCFTDASLLKAVDRTFFFRRPDESSD

SEQ ID NO: 3019 - protein, 99 aa, Zea mays
MQKSGVRSEPTGAEATDTGTQNKMREENPGPKTSTPVRSPPPAHNNHLFINTWPAMRAHPSWQRPPLGCHIFFSLFFAVDARRLLHAAAYLASSRRHIS

SEQ ID NO: 3020 - protein, 583 aa, Zea mays
MKFKSETNSPRITGDRDKGSYLARSLPSPTSRAHQTQSPGLSVPNPPSGLPPMSSQCPYCRASGPARCATTQPPLSRAVSECSACARIVLERHLHTHPFFPLLPSLHPLPLVTPDLATAIDPAPSPSPGDEDDEDPFLPAGFVSAFSAFSLERHPVLARSASTFSGHLAELERALAVDSATAASNPDPAGPMVSVDSLRAYLQIVDVASILRLDRDIADHAFELFKDCSSATCLRNRSVEALATAALVQAIREAQQPRTLQEISTASNLPQKEIGKYIKILGESLKLSQPLNSNSIAVHMPRFCSLLQLNKSAQELAAHIGEVVVNKCFCTRRNPISISAAAIYLACQLEDKRKTQAEICKVTGLTEVTLRKVYKELLENWDDLLPPDYTPATPPEKAFPMTNIYSGRSASGKDMYQDKIFESIKQKCPEPAEPDHMVVVKEEGDKKTAALGRPPTKLDHPELGKVFRPPNAPFSTSPKSDRDKTETSLRGFNLNEVSCAMDSDRTDITVKPTFGDRLSNDPNANPSPNRQPLPWQLKQGAPATAPSYSRLREQQSGLDLVAALKGVGKRSPGDSDVRDKEGK

SEQ ID NO: 3021 - protein, 128 aa, Zea mays
MADTNQNREQTLIAGAGLGLVAVHSGLTVYRAMGDKQAAVLFVAWSCLTLVLVFVCLLAYERAAPGSPARERASRAIWPPTTLLTLSFAWKVTADMPPDSAAAAALVWGLAIATTAGGFVALSVRAGP

SEQ ID NO: 3022 - protein, 633 aa, Zea mays
MDDDEIGPKELQRRIKDEHKVNISYKRVYYGKDLALKQLHGDWYESFNNLYRFKAAVEEASPGSFVVIDHEVINEKTRFKRAFFALKACVDGFLNGCRPYLAIDSTFLTGKFRGQLAVACAVDGHNWLFPVSFGVFDLETIENWSWFMERLKDAIGTPPGLAICTDAGKSIMESVTVVFPSAEHRECMVHLVNNFKKSYRGKVFDDNLWPAAYAWNPYYFDKHWKAMAEAKPAAVKYLRDNHNKIWTRSQFSTLSKVDYVTNNLAESCNNWVKGHKGMHLDSLLDTLRQKIMAKFHKRRKLGEKMQGKILEHIVKNLAERSRNLNMDVTGSSNDIGEVSWRGGSGYRYAVNLKERTCTCREWQISGKPCLHAIAMITSIRNEKLEDYVDMYFSVEKFRKAYEGIIPALPDKTQWPESTHGFFMHPPLLKSTAGRRQTKRFKGSSEGTSGRKGRHRCPICKQLGHHWYTCKEGDPNDIAEMLAARGKPKPRKRKPKEPTTEASGVDASTASGLATVKMVFPPETNSELAIVPAKKRKKNPAATTSNGIRMSGSGSNQVVVAPLAIVLPSEVQSKEIKQSKAKEKKKNIKNKMDKKKTIHVPQHSPANCTRSKGQGQPTPDSPAMSTRSKRKLQI

SEQ ID NO: 3023 - protein, 701 aa, Zea mays
MEGGEAGGLRFLLRFDPARPGLDRALLGFSFSALFSRLVVGWSKHGQTGGGGGGGFPAIAAEGEGGEGSGNAAVSVAALAAAAAAASLCLAAMYASDQRRPRHARARRLPALASAPRSRALHAPHDGLRILSSDDPNDESPDKVIHGASIGAGDDEPDIVARVEMDATPPAVPVPNADDDDDDDETETEAEEEEEEEERQELQRLRELWLSLEEREQRLELRLQELEGLRSQEAAARELEARVAAADAEVRILQLSVSALQEENGRLRARAEDLDAARAELARAKEKLRAVKARVQGEQEAAAAALRRKVEELESGGRERVGALVAEVAELRKANAALEADNMELALRLQDAEQQAASGASASNLAPEEGMIQEMTYLRESNERLTRQIEQLHNDHCAHVEELVYLKWVNACLRHELRDHDGQPTAEQQGPSAGSRDLSALELSKSMSFRSSERAKQLMLRYGSPGLDRFDPALFSPLHESVDGDGYGYERSPAHSYEPERSPCARPATATASSSPAAAPGKKAGPRRLKLLGNIKKLLPAVGKRSHSNHGHGHAGHDGRKAPAPAPARRDEYLDKAMQWLSAHDVLDGDHSYVSTPLSSCERTPLSSATTSTTADSRARCGDGGGGRSERGEATRPEAEPTLARSKSDAGGAYGREASRYHALRPEHPGREADEPDGFRAPEKREARRQSAEELRTPAVA

SEQ ID NO: 3024 - protein, 56 aa, Zea mays
MLDRMGSDMDTSRGFLSGTVGKFKTVFETKSTGLLLDQVESSTVKVLWGWACSRTF

SEQ ID NO: 3025 - protein, 553 aa, Zea mays
MARPLQEAIDTFISITGADEAVAVRKLEEHGGDLNRAINSHFNDGDSILNGISQNTMPTSHDDMMDLDGPLDNTFQRSLFPENFRDPFALMDPNFQHQFFDRVGSTDGVTRGPLVSHPREVREIPIEVKDSDPQTSPSGQAPVIEDVTGHESSNGLEVHETIIIDDEDSGLLSAPSAPHASVPSNTSSEPTAPPLVHVNDYDDDIEEEMIRAAIEASKKDSEGLANIAEQGDQHQEGVNLGEHSSDKAVMRTTDGIVERQVLASGKAGTSRQPIDEESFQEETEDVEEQPLVRRRSRRAPSENTELAQMPHPGASPVLNNHQSSGGDFPSEWGGISSEEHDEAVMLEAAMFGGVFGRPMHPFSMPSHRSSTYYPQITHSSSPALAEQRLLREQQDDEYLASLQADQEKELKALQDAELHRLEETTTREVALKKQKQEQEERRKKQLEEEELESSLASKQASLPSEPPPDAEGAVTVVVRMPDGSRQGRCFLKTDKLKFLFDFLDIGRICKPGTYRLVRTYPRRTFTSSEGDVSFSDLGLTSKQEALFLEQITE

SEQ ID NO: 3026 - protein, 184 aa, Zea mays
MLQNGDFEEGPYMFPGVPWGGAGAVPPVDEDDYSPLPPWMVLSATKSVKYLDAAHHAVPRGAHAVELLSGTEAALAQDVATVAGRPYRLEFSAGDGCVGSLSVRAYAARGSVTVPHASRGKGGHRRGVLDFTAVAKPDAGGVRQYGLHHEERRDALWPRPRRCLARRLAQPCCSPAASLIVLYY

SEQ ID NO: 3027 - protein, 404 aa, Zea mays
MTSTAAGASSSAAKSESYLRADKIDLESLDIQLEKQLAKTWEKHKGSYNQGPREDWEIDLAKLEIRYVIAQGTYGTVYRGTYDGQDVAVKLLDWGEDGFASETETATLRASFKQEVAVWHELNHPNVTKFVGASMGTTDLKIPANSSNSGGRTELPPRACCVVVEYLAGGSLKQYLIKNRRRKLAYKVVVQIALDLARGLNYLHSRKIVHRDVKTENMLLDTQRNLKIADFGVARVEAQNPKDMTGATGTLGYMAPEVHYATVLDLYRNDYCHCISVLYRDNCLEQLVSVQVLEGKPYNRKCDVYSFGICLWEIYCCDMPYPDLSFADVSSAVVHQNLRPDIPRCCPSPMANIMRKCWDANPDKRPDMDDVVRFLEALDTSKGGGMIPEGQAGGCLCFFRARGP

SEQ ID NO: 3028 - protein, 756 aa, Zea mays
MQGGPLSPDEYRVASPPALLHQPAPVIVVAIDRDRNSQLAAKWVVDHLLSGASQIVLLHVAAHYPANHGFAMAETTQSALEAEMKEIFVPYRGFFNRNGVNVDVFEVVLEEADVSKAILGYITANKIQSIALGGASRNAFTKKFKNADVPSTLMKCAPDYCNIYVVAKGKSVNVRLAKCGVPPMHGGADSPSDTDSVRESGLYIRRGSRGHGHLPPVMPDARRSMDGRSTLPELTTRPPFRERSLPSSATKNVVVLPGKDYSEAPSRSARHDSFGGDLDFGPSTRFSSMDFGDNLDLTASPAREPMSPATGAQRDIEVEMRRLRLELKQTMDMYNAACKEAINAKQRAKEMQLMKLEEERRLEEARHAEETALALAEMEKAKCRAAMEAAEAAQRLADLEAQRRRNAEVRARREADEKVRALDAISNHDFRYRKYHIDEIEMATERFSDELKIGEGGYGPVYRASLDHTPVAIKVLRPDAHQGRKQFQQEVEVLSCIRHPNMVLLLGACPEYGCLVYEYMEHGSLEDRLFRRGGTPPIPWAQRFRIAAEIATALLFLHQTKPEPLVHRDLKPANILLDRNYVSKISDVGLARLVPPSVADSVTQYRLTATAGTFCYIDPEYQQTGKLGVKSDIYSLGVLLLQVVTARPPMGLTHHVEKAIDAGTFAQMLDITVKDWPVEEALGYAKLALKCTEMRRRDRPDLATVVLPELNRLRNLGHAYEARMSAVGTNSGSGESNDQVSGSSPTAGGSWRTAES

SEQ ID NO: 3029 - protein, 232 aa, Zea mays
MASPPHSFEVRTPGDSPRPTAALLSPSVAAPQPSTASRLLLLLTAAVAAATAFVLLHLPTTVVTAASATARPLSKLSKPVVLLISSDGVRFGYQYKAPLLHIRHLFANGTSAAEGLVPVFPTLTFPNHYSIVTDLYPSSHGIINNYFPDPISGDYFTMKNHDPKWWLVEPLWATAAAQGVLSATFFWPGSEVTKGSWNFPDKYCRHYNGSVPFEERVDTILGYFDLPPNQMP

SEQ ID NO: 3030 - protein, 244 aa, Zea mays
MFWRMTGLSAASPVDTILDKENFTLEELLDEDEIIQECKALNSRLINFLRDKSQVEQLLHYILEEVPEDAERKRSFKFPFIACEIFTCEIDVILRTLVEDEELMDLLFSFVKPDHPHSTLLSGYFSKVVICLMLRKTAPLMSYVQGHPKIVVQLVDLIGITSIMEVLIRLIGADETIYSNYGDTLQWLENTDVLEMIADKFGSSGKPGAMKQKLCIQLKHSYLYDMDNSVHLNYATKVTGKPPY

SEQ ID NO: 3031 - protein, 824 aa, Zea mays
MATILGADGGRERQQRGEQGRTFPGCVDSPSMMASERSEAEIGQRGRVCWRDSVREESGRRHKPEPQFGKPPMLPSRHLRAAARQRSHRRPPAPADACITGKPDMEVIRRNRAITAHMRAGRVPDAERLFAAMPRRSTSTYNTMLAGYAANGRLPQALSFFRSIPRPDSFSYNTLLHALGVSSSLADVRALFDEMPVKDSVSYNVMISSHANHGLVSLARHYFDLAPEKDAVSWNGMLAAYVRNGRIQEARELFDSRTEWDAISWNALMAGYVQRSQIEEAQKMFNKMPQRDVVSWNTMVSGYARRGDMAEARRLFDVAPIRDVFTWTAIVSGYAQNGMLEEAKRVFDAMPDKNAVSWNAMMAAYVQRRMMEEAKELFDAMPCRNVASWNTMLTGYAQAGMLDEARAIFGMMPQKDAVSWAAMLAAYSQIGFSEETLQLFKEMGRCGEWVNRSAFACVLSTCADIAALECGMQLHSRLIKAGYGVGCFVGNALLAMYFKCGSMEEAHSAFEEMEERDVVSWNTMIAGYARHGFGKEALEVFDTMRKTSTKPDDITLVGVLAACSHSGLVEKGISYFYSMHRDFGVATKPEHYTCMIDLLGRAGRLDEAVNLMKDMPFEPDSTMWGALLGASRIHRNSELGRNAAEKIFELEPENAGMYVLLSNIYASSGKWRDVDKMRHIMHERGVKKVPGFSWIEVQNKVHTFSVGDSVHPEREDIYAFLEDLDIRMKKAGYVSATDMVLHDVEEEEKEHMLKYHSEKLAVAYGILKIPPGRPIRVIKNLRVCRDCHTAFKCISAIEGRLIILRDSNRFHHFRDGSCSCGDYW

SEQ ID NO: 3032 - protein, 270 aa, Zea mays
MIWHVQNENFILDSTRIFMKAFHLLLFHGSFIFPECILIFGLILLLMIDLTSDQKDRPWFYFISSTSLVISITALLFRWREEPIISFSGNFQTNNFNEIFQFLILLCSTLCIPLSVEYIECTEMAITEFLLFVLTATLGGMFLCGANDLITIFVAPECFSLCSYLLSGYTKRDLRSNEATMKYLLMGGASSSILVHGFSWLYGSSGGEIELQEIVNGLINTQMYNSPGISIALIFITVGLGFKLSPAPFHQWTPDVYEGVWFVRQIPTSI

SEQ ID NO: 3033 - protein, 870 aa, Zea mays
MWVLILGSKGEAANAIRRVQVAAEAECGRKLRVLRTDNGGEFTAAEFASYCADEGVQRHYSAPYSPQQNGVVERRNQTVVGMARALLKQRGMPAVFWGEAVVTAVYILNRSPTKALNGMTPYEAWHGRKPAVSHLRVFGCLAFTKELGHISKLDDRSTPGVFIGYAEGSKAYRILDPRTQRVRTARDVVFDEGRGWAWDKAVDDGTTPTYDFTIEYVHFEGAGGVGNSSPSRSTPAPKSPPTPAPHSPASATTSSSPPRTPATTPATASSSPPRTPAPTVPSPGTSSPTPARVEHDPVELVTPLSRDEERVDACYDGEPLRYRRVEGLLIDPSVPGPASRILAGELHLACDDGEPRSFAEAEQHAAWRAAMQSEMDAVETNRTWELADLPHGHRAITLKWVFKLKRDEAGAIVKHKARLVARGFLQQEGIDFDDAFAPVARMESVRLLLALAALEGWHVHHMDVKSAFLNGDLKEEVYVHQPPGFAIPGKEGKVLRLRKALYGLRQAPRAWNAKLDSTLKRMGFMPSPHEAAIYRRGNGENALLVGVYVDDLVITGAKDAEVAAFKEEMKATFQMSDLGHLSFYLGIEVHQGDSRITLRQTAYARRIVELAGLTDCNPALTPMEERLKLSRDSTTEEVDATQYQRLVGSLRYLVHTRPDLAYSVGYVSRFLQRPTTEHEQAVKRIIRYVAGTLDHGLYYPRCPGEAHLVGYSDSDHAGDIDTSKSTSGILFFLGKCPISWQSVKQQVVAMSSCEAEYIAASTASTQALWLARLLGDLLGRDTGAVELRVDSQSALALAKNPVFHERSKHIRLRYHFIRDCLAEGSIKARYINTKDQLADLLTKPLGKIKFVEFCSRSGMTQLSHKTTHKT

SEQ ID NO: 3034 - protein, 263 aa, Zea mays
MGLKVFHWLNRRMHSNTEYCSIHGSKAMEDKDSVPHSVVEKDTEALLLHDVLLNGILAIGTLGHHVDSLCPVACIEEDDLFIMDDEKAIVEERDDEEPRNDQVKEDVALETEPCEPVWPIVEPAKMHSLSMKEDNFTCFVAEEILIREVEDGGGANIQERPLLMLEKVEKVRTTLADLFAAEVFSSSSPREYSCQDIIDVAVASTSKHASCMEKMHQKKPRKPTPKPLKATRKLSRVMRKMLGKKIHPEQLNGRSNAEGPLTA

SEQ ID NO: 3035 - protein, 364 aa, Zea mays
MNRIDRKRRSPFPAPACLGYLLPLPPSSHHTDSRHHWPAGLFVHSLSLARSPARPPASLSFHLLNAYKYSTGSHVHGRNVHLPSLPPHGCWLLLGRPSHTPAVALSLVWSSPASPSLILSSAAPACQCHHPPAVRIIFGPNPSKWSRRRGGAACRRSESGTTTTTAAARSSPRPRHRRSWRPAATSGSSTRRPRGSHRRRRRPAGKFGGRRPTGPHAAAAASGPVPRRLRGRPTPWSHRRRPCHARRRRARPALPGRAWCAASTRTCTRCPRRTCSTTRICHRGGRRRPAGACGWVASASVAFRLINYFLYFFIHVSTPSLTVLLFRLCNVLVFLFVSRLDFRLCNVLVFFSFWTRASIVQCGQ

SEQ ID NO: 3036 - protein, 236 aa, Zea mays
MASPNADPAQHHASTPPLLLAVRHLPFPGVHRTRALPGPDVLTPLARRLEELASAATSHPLLKPLFAAHSHLSSFSQGRRRLVAARRATVLSGGHCFAAVLGNSVAGLVVSNGINNFLNLYNTVLVVRLVLTWFPNTPPAIVAPLSTICDPYLNIFRGIIPPLGGTLDLSPILAFLVLNAFTSTAAALPAELPSSAAAQHHQRTAASSSSATPSPNQRKWMRRMRSKTSQGEDGGH

SEQ ID NO: 3037 - protein, 731 aa, Zea mays
MGRGGIGGAAAMAMAMETADPARAFVKDVKRIIIKVGTAVVTGMNGRLAMGRLGSLCEQVKQLNFQGYEVILVTSGAVGVGRQRLQYRKLIHSSFADLQNPQMNFDGKACAAVGQSVLMAIYDTLFSQLDVTSSQLLVTDRDFKDPSFGDQLRETVFSLLDLKVVPLFNENDAISTRRQPYEDSSGIFWDNDSLAALLAAELNADLLIMLSDVEGLYSGPPSDPQSKIIHTYVNEKHGKLISFGEKSSVGRGGMQAKVSAAANAASKGVPVVIASGFATDSIITVLKGEKIGTLFHNEANLWACSKEATAREMAVAARDCSRRLQKLSSEERKQILLDIADALEANEDAIRSENDADVEAAQVAGYEKSLVARMTLKPGKITNLARSIRKTADMEDPISHTLKRTEVAKDLVFEKAYCPLGVLLIIFESRPDALVQIASLAIRSGNGLLLKGGKEVMRSNAILHKVITGVIPDTVGKKLIGLVTSKEEIADLLALDDVIDLVIPRGSKSLVSQIKATTKIPVLGHADGICHVYIDKSADMDMAKRIVLDAKIDYPAACNAMETLLVHKDLNKSEGLDDLLVELEKEGVVIYGGPVAHDKLKVPKVDSFRHEYSSMACTVEFVDDVQSAIDHINRYGSAHTDCIITTDRSAAEAFLQQVDSAAVFHNASTRFCDGTRFGLGAEVGISTERIHARGPVGVDGLLTTRCILRGSGQVVNGDKGVVYTHKDLPLQ

SEQ ID NO: 3038 - protein, 562 aa, Zea mays
MLSHLLPRHHHRRLLQILSRAAAAPDVDLHQRLCSSSAASSTSLSIWWRKKEMGKEGLMAVALLKRLAALPPVGCHPRLEQFMRSHVSQLLRTDLLAELLRQDHASLSMKEPARLLLYCVVAAGFSRGPGAEAPSRGSRPSLLPAQGPHAGGRASRRRGPGKQAVQQAGAAQAAGQASSATSRRMGPGATRDQQPASSAVAARQSMKYPGSATAPAGSRQADCHISPSRLQIAAAEANRSANLGSNPRHLCFAPPSSFVLPADLIPAGRRPSHDAWPYLYFSSRGTSPSRDACSLVPSPSSFTKSRSVPDCKCQMLSRLLPRHHHRRLLQTLSRAAAAAPDVDLHQRLCSSSAASSPSLSIWRRKKEMGKEGLMVVAQLKRLAALPPAGGHPRLEQFMRSHVSRLLRTDLLAVLAELLRQDHVSLSMKIYGVVRKEIWYRPDMYFYRDMLYMLARNKKINETRQVWADLKSEDVLFDQHTYGDIVRAFCDADLIDLAMEIYDDMRSSPDPPLSLPFRVILKGLVPYPELREKIKQDFLELFPDMIVYDPPDTLSDIDEEFKF

SEQ ID NO: 3039 - protein, 238 aa, Zea mays
MRRQPFSRHAGFFSCLQRVEDRLASESEQQHQEQKESPPPPATAKATATTRQTEASPFSDTMTASPLLFLDPAAPAPAPGSSSGPALDFLTAATQEGKHIQQEDDDNDGGGDGDEEDIARLMELLGLSSGGGGSSRRDDDGGGCDCSGADGFLAKVVGVVGPKCDREKGRLDAWIRHYHRGGGREPARLAHLLLARAAADTAAVAFPASVKDFLDHDPPRQLTDESEWSDANGDNNRD

SEQ ID NO: 3040 - protein, 430 aa, Zea mays
MQSGGDMRPVHNSVDTVNAAAVAIVTAESRTQPPAEQRRKWADRLSVYFCFGSQKNGRRMRVNHAALVPEPAPQRTDAPAAEIPNHPPPPVFPFVAPPSSPASFLQSEPTSIVQSPRAGAPAFSPLSPNSQSPTGPPSIFAIGPYAHETQLVSPPVFSAFTTEPSTAPFTPPPESVHLTTPSSPEVPYAKLLTSINNSKNGEAGGDLQSYPNYPDSPIGRLISPSSGCSGTSSPFPDPEMQASSRSALRLFPVREPPKILDGEGVATQKLIPRHMRNGGSLLDGQISAAVPVVDFSARLQPNEHAMDHRVSFELTVEDVARCLEKKTAISGDSGTASFHLAPTGSGDHHRESNEARAGLYVDESYHDLPEKARRSLSLRLAKEFNFNNVDVGSVEPSVGSDWWANEKVAGMTTEPKKNWSFHPVVQPGVS

SEQ ID NO: 3041 - protein, 568 aa, Zea mays
MGPTTRAHFVYNRRRRRRRGGRHAVEEASDEEQQQMDSSSSSSDEEGDQEEDAEASGEDVDDEEEEEAVAAEPAPKQPPAAAAAGEKRGRRKGSITISLKKVCKACKRTGHQAGFKGAVYIDCPMKPCFLCKMPGCHTTLTCPHRVTMEHGVIPAPKRNANTSLDYVFQSQVKGKIPMVKPKFLIPNQLEHGNIKFHQRRVTCLEFHPTKNSVLLSGDKKGLLGIWDYVKLHEKITYDSVHSCILNSMKIDTTNDGMIYTASSDGTISCTDLDTGIGSPLLNLNPNGWNGPSSWHMIYGMDLNTDKGLLLVADNFGFLYFLDRRSKTRIGHPILIHKKGSKVTSLHCNPARPEVLLSSGNDHYARIWDTRKLEANSPLASLAHGRVVNSGYFSPRSGNKILTTCQDNRIRVWDYILGDLQSPSREIVHSHDFNRHLTPFKAEWDPKDYTETVAVIGRYISENYNGVALHPIDFIDTSSGKLLAEVMDPDIITISPVNKLHPQDDILATGSSRSIFIWKPKIEDELTEERAKHDNSSDDDSGGDSGGKNKKAKKTRFTHAVKGKGKSKV

SEQ ID NO: 3042 - protein, 760 aa, Zea mays
MSARGVRPGVLHHKENNPADAQPGKRQRTAAGAGRQPLAAAPPPQEEPMVFSGREDVDALLNEKMKGKNKMDYKGKSEQMMEYIKKLRACTKWLLEREDANLVEIERITGQLDATHKQHSEIVAVLKNTIEETKSICEELQKQCASLQEALKTVEAEKMDALRSLGDEREARMGVESLRNGLLEDLNRAKLEEKRLNDQIKMLQDTNKRLQEYNTSLQQYNCNLQADATKNAETIVKLQKEKNTMVETMNGLKDHANSVKMQLDIARSLQNEATKQKTDLLKEVESIRMELQRAREDRDTKSAQVDSLLVDIGTYKEMTGKSVIELDSAMAKTSALEETCSSQRKMIETLEIKLAAANEKLKRSNMTASETMTEYENMKKMLESVQSRLEEAEQTILEGENLRKKLHNTILELKGNIRVFCRVRPLLPNESGAVSYPKNGENLGRGIELLHNAQGYSFTFDKVFDHSASQEHVFIEISQLVQSALDGYKVCIFAYGQTGSGKTYTMMGNPELEDQKGMIPRSLEQIFQASQTLNSQGWRYKMQASMLEIYNETIRDLLATNRMAVQDVGASKYSIKHDTNGNTNVSDLTIIDVTSINEVSSLLRRAAQSRSVGRTQMNEESSRSHCVFTLRIFGVNEGTDQQVQGVLNLIDLAGSERLNKSGATGDRLKETVAINKSLSCLSDVIFSIAKKEEHVPFRNSKLTYLLQPCLGGDSKTLMFVNLSPEASSTGESLCSLRFAARVNSCEIGIPRRQTQMRSSQ

SEQ ID NO: 3043 - protein, 618 aa, Zea mays
MVQQHWYRFNFALATRVADCLAREGKVEKCREVFDAMIKQGRVPAESTFHILVVAYLSVARGGCLEEACTIYNQMIQMGGYKPRLSLHNSLFRALVSKTGGTAKHNLRQAEFVYHNIVTSNLEVHKDIYAGLIWLHSYQDVIDRDRIKALRDEMKRAGFEESTDVLVSLMRAFSKEGDIKETEATWHWLLRSGCELPAQAYICRMELYARTGEPMKSLEMFKEMKNRNIPPNVASYHKIIEIMTKAREIEIAEKLMDEFVESDMKHLMPAFLDLMYLYLDLDMHEKLEHTFTKCLGRCRPNRILYTIYMESLVRIGNVSKAEEIFDEMHKNGMIGTNAKSANILLRGYLLAENYQKAESIYELMCKKKYDIPVESLEKLQSGLLSSKKVVKPPKPVSMKLDEEQREILIGLLLGGTQIESHAQKGVYIVNFKFQEDSHAHSALRVHIHERFFEWLPSACRSLNRESEIPYRFSTIPHAHFGFFADQFFQKGQPVLPKLVHRWLSPRVLAYWFMSGGVRLQSGDIVLKVSGGDTGGVERIVKSLQAQQSLACKVKRKGRFFWIGFQGCNADSFWKIVETYVLDSFASSTEESHNVGSDGLQDYTYYESDTQRHGRESEE

SEQ ID NO: 3044 - protein, 783 aa, Zea mays
MATAPPCACGAPSPSLRCPLALPLPFATSHPAVRLAAPPLLARRLAVSPRRAASALEALVLESDDEEEESGIGLFQGEEWAATADERDAVRSPELEVFELEELPEQWRRSRIAWLCKELPAYKHSTFTRILNAQRKWINQDDATYITVHCLRIRHNAAAFRVYSWMVQQHWYRFNFALATRVADCLAREGKVEKCREVFDAMIKQGRVPAESTFHILVVAYLSVARGGCLEEACTIYNQMIQMGGYKPRLSLHNSLFRALVSKTGGTAKHNLRQAEFVYHNIVTSNLEVHKDIYAGLIWLHSYQDVIDRDRIKALRDEMKRAGFEESTDVLVSLMRAFSKEGDIKETEATWHWLLRSGCELPAQAYICRMELYARTGEPMKSLEMFKEMKNRNIPPNVASYHKIIEIMTKAREIEIAEKLMDEFVESDMKHLMPAFLDLMYLYLDLDMHEKLEHTFTKCLGRCRPNRILYTIYMESLVRIGNVSKAEEIFDEMHKNGMIGTNAKSANILLRGYLLAENYQKAESIYELMCKKKYDIPVESLEKLQSGLLSSKKVVKPPKPVSMKLDEEQREILIGLLLGGTQIESHAQKGVYIVNFKFQEDSHAHSALRVHIHERFFEWLPSACRSLNRESEIPYRFSTIPHAHFGFFADQFFQKGQPVLPKLVHRWLSPRVLAYWFMSGGVRLQSGDIVLKVSGGDTGGVERIVKSLQAQQSLACKVKRKGRFFWIGFQGCNADSFWKIVETYVLDSFASSTEESHNVGSDGLQDYTYYESDTQRHGRESEE

SEQ ID NO: 3045 - protein, 288 aa, Zea mays
MGRVHPCCSEEKKVRKGLWSPEEDERLASHIARFGVSCWSSIPELAGLQRCGKSCRLRWMNYLRPDLKRGRFSQQEEDLIIALHKALGNSWSQIAARLPGRSDNEIKNFWNARLRKKIRQKEASSSASSTAGSKEPAARRNRPNSTENGDDRIKPAPPPVFTPYPFVPPSPRDHVAAAASGASSCDDYSSAAGSFVADPAAAAACAAVHVGYATDRSAAAAESGVTPTPPSMTTSTSACTDDARGSCDDGFLRAMVDDPSFLFGDFYLDSDGGHHGQIMSFWESHAFS

SEQ ID NO: 3046 - protein, 566 aa, Zea mays
MAANGGAAPTSRALIGPASPLPARASVPPRSTPTPPRAPLPIPPSPDPLRPATGTAWQWPVGVRARAPAQTIRASSALFYTYAAALVGDTCPPPHSDPRPRRSETRSPAPKQAEAASGTGSGCLPPPASAHPTTAPPPPPQSGPVPSNSVVPRIDCARARARRFAVFDHPQATYIARREFRPASSSPAAVSERRRSMDLKDSERRGAAGPGPLSRQGSIYSLTFDEFQNTLGGTGGGLGKDFGSMNMDELLRSIWTAEESQAMASASEPAAGAAGDGGAALQRQGSLTLPRTLSVKTVDEVWRDFAREGTAGGPEPQPNRQPTLGEMTLEDFLVRAGVVRDNPAAAAAAAAAVPAQPVATRPLQAVNNGASIFFGNFGGANDAGAGAMGFAPVGIGDQAMGNGLMPGVAGMAAGAVTVSPVDMSVAQLDSMGKGNGDLSSPMAPVPYPFEGVIRGRRSGAGVEKVVERRQRRMIKNRESAARSRARKQAYTMELEAEVQKLKEQNEELQKKQEEIMEMQKNQVEFCIKFPLLMFLFHGTLKMDAFMLSTSEFHCVFHLSSWRTYGN

SEQ ID NO: 3047 - protein, 544 aa, Zea mays
MGSCVSVSSTRHRRRRSRKLSVAARKFRRKLSTAIAADAPIVRGAGSAATCLARHGVVHVEAPDSNVTLRLTKLQWQHSQMDAGSVVCEEAWYDSVSILESPDSDDDLDNDFASVSGDPLPDVTGGSDAPQCKEAACFLDTMQLLRSIANAEAYDQSEQPADKSDDDDSNVAATATNNSGSCNNDEGCCSSTLKELQAAMSPRPFPASVPSNKVQPMPVVGVSPVPPPHQQQQQQKKKTAVVRLSFRRRSYEGDEMTEMSGSANYLYRPRAGFTVPCSTGEKLPQGCWSVLEPSTFRVRGESFFKDKRKYPAPGCSPYTPIGVDMFAYTRKIHHIAQHLSLPSLKTHETFPTLLIVNIQLPTYPATVFGDNDGDGISLVLYFKLSDSFDKEISPQLQDSIKRLMNEETEKVKGFPVDSIVPYTERLKILAGLANPEDLQLSTAERKLVQTYNMKPVLSRPQHKFYKGSNYFEIDLDVHRFSFISRKGLETFQERLKHGVLDLGLTIQAQKAEELPEHVLCCMRLNKIDFANNGQIPTLITAADE

SEQ ID NO: 3048 - protein, 324 aa, Zea mays
MALVLGREEELLAQLRALLTFLPPPASPPAPAAPVKVESIMGTSGGGRRLGSKRDRDDDSEAEAEQHGDEPAAAQPHYCPHPPPPCKRTRRRKNKKKRQQSKCLVTTVPDFDGYQWRKYGQKQIEGAMYPRSYYRCIQSAKQGCQAKRTVQRNDDDGATAPPEYTVVYVAEHTCTANDDALEAPPVILETTTSVVVRAPAAHTDPVVVVVPATATTSAAAAASACSTTVTTGTESPAISGDDVACCWSSSGSSSSGYSYADDSCCCCCCDGLLAAVVHGGCGGSWAPGPADSVSVPSFRLQEMEDLTGPIRSPVHVVPRAWLDR

SEQ ID NO: 3049 - protein, 251 aa, Zea mays
MVERERGEGEARALASGPGQQQQQEGAAEGERVEKEGDEREEEDRDDEAVEWSEIRLAIEELSPAAHLKRVDGDGKAAASSLPTLRFLALSHLLVRVLDKIGPTMAVLRLDVQRNIERLQELYLLDPATYSTLTGIVEKEVKEGTARKVDSCARAILWLARSMDFTAALLQRLEEDSTQQQQQSLAQLVEAAYEATLKPWHGWISSAACKVGATTPPRILFCGRADSVEAHPREEGLHRHAAGDGPGLLCT

SEQ ID NO: 3050 - protein, 1411 aa, Zea mays
MHLDGVDDELGGGSCAPSPARFELQEDPSFWKDNNVQVAIRIRPLSGSEVSMQGQKRCVRQDSSQSLTWIGHPESRFTFDLVADEHVTQEGMFNVAGVPMVENCIAGYNSCMFAYGQTGSGKTHTMLGDIENGTRRNNVNCGITPRVFEHLFEKELRRDEKLMFTCKCSFLEIYNEQILDLLNPNSVNLQIREDARKGIHVENLTEHEISNAREALQQLIEGAANRKVAATNMNRASSRSHSVFTCLIESKWESQGIKHHRFSRLNLVDLAGSERQKSSGAEGERLKEATNINKSLSTLGLVITNLIAVSNKKSQHVPYRDSKLTFLLQLPFHFESYTFDISRFLSSCAAETLSTLKFAQRAKYIRNNAIINEDASGDVLSMRLQIQNLKIIIHLKLTCFCRKVISRLQGQLGSDKTESIASHGFVCESPSTFKWDQGHGMFTPLTFDKRATQRNDCDAALVAAFRREQEKEAQLKAVIDAKQTAEQLVAQKTEEVRSFKMRLKFREERIKRLEQVASGKLSAEAHLLQEKENLVKELEVLRGQLDRNPEITKFAMENLQLKEELRRLQSFVDEGEREMMHEQIIVLQDKLLEALDWKLMNEKEPINKGLSLFGESAGDEENEFLRLQAIQNEREIESLRKKMTFCLEAKDNLERHVNELTTELELTKKHNNTYKEFKAAQLQEQGEADLHNLSDAQMELKTLVDAIASASQREAEAHETAIGLAKENEELRLQLKVLIEDNKRLVELYEHTVVNVEANQDGNPVDDLLNAQPAATSDFHAHNSSSVAQESKIVDEKCTNEDNFSRVTSVELRLQLEEMHEENDRLMGLYEKAMQERDEFKRKILEQSDSEAVKHIQLDEKDVEMSEAAENPEVKHIHDSTIAALKEVLQIVRSKLELVQDKVVSAQDAVKYFKALEIASGKAEELSARIELQRLGAQRGQEEITFLKSVLSESQKKKNAFEGKYFLPAASCWNLVLKTKSLAESKFDASFGSMNQKKEQLNHLQTRKIELSAARTRARESETELKSKIDGLKAKLRAHEAQRKEEEKVLFAIDNLDTSTTLMHKPKNYGKATDLLKSEEDRMKLLCELQKAREQRSMVHKEIRSMNECDYIDREIGVLEAEIEDSCISILETDIEKFVRDNTLAEIWEGSAKDLEALLVDYQDCVFQVNLKEEEIKVCSESLQYQARDMDKLQSKLNQAIRELGELLQDRRSLTACSLDEPTLPVGEKVCQPAATCAGSAKGSRKESAAGSRSGRGAGRMREHWHGDGDGDGEDEHEPQPGCGEGAGQAAANCAAVCCCCPLALLDVLLLVTVRLPAGVMRRVRRRRRRRRGHGGAGANRKRPAPASPSGSSGKAMIGAATLDIDEEARGEVESAAAAELEREIMSSHFYGAGFWRSVSSNSSSSSRRYQ

SEQ ID NO: 3051 - protein, 312 aa, Zea mays
MSDSYCPDCKKHTEVAFDHSAGDTVCTECGLVLEAHSVDETSEWRTFANESNDNDPVRVGGPSNPLLTDGGLSTVIAKPNGAQGDFLSSSLGRWQNRGSNPDRSLILAFRTIANMADRLGLVATIKDRANEIFKKIEDLKSIRGRNQDAILAACLYIACRQEDRPRTVKEICSVANGATKKEIGRAKEFIVKQLEVEMGQSMEMGTIHAGDFLRRFCSTLGMTNQAVNAAKEAVQRSEELDIRRSPISIAAAVIYMITQLSEDKKPLKDISLATGVAEGTIRNSYKDLYPYASRLIPNTYAKEEDLKNLCTP

SEQ ID NO: 3052 - protein, 77 aa, Zea mays
MGCDDKCGCAVPCPGGKDCRCTSGSGGQREHTTCGCGEHCECSPCTCGRATMPSGRENRRANCSCGASCNCASCASA

SEQ ID NO: 3053 - protein, 262 aa, Zea mays
MANLFLKQAKQYVATRPVYPPELFDFIASKTPRRDMAWDVGTGNGQAAASLAKLYKHVVGTDTSAQQLAYATRLSNTRYVHTPADLPLEGIHATVAPPASVDLVTVAQAFHWLDLPRFYAQARSVLRPGHGVLAAWCYTEPRVNAAVDAVFWRLYHGSQGFWAPNRRMVDDEYRSADFPFDPVEGEKHTGPFQFSTHRRMDLDDYLMYITSWSAYQTAKDNGVELLDAPTVQEFAAAWGGDAKEVKTVTYPIFLRIGKVRSE

SEQ ID NO: 3054 - protein, 290 aa, Zea mays
MDSELEKNKTMDGDVGNSRSYGDPVASALNSTNFNIEEEKDNDFKRTSRPKNRFVITFLHNLVGFYYNLDACFALDAVTRCPYLGCKDATKMMLDVKEIFTCQIQVELPKTNPVYLMLRTSFGFSAKGTGLKALEFALSICDSFDMYGFTVDPGYKEWTRYFSEVRKGHTPLHGRAYYQMMECLGLVKIHSPMQGDPGRTVRWLPTKATIEAARVASEKLLKRPGAGSDDPLGTCTMIKKRRKGKAPNRSGLRDAAMKHLEDMKGATRYPLERNAGGGYLCMINDRYDRG

SEQ ID NO: 3055 - protein, 247 aa, Zea mays
MMSYQLDVFFLILFNRLLFPSASWGITNNEVLMTSNMARMSDIDWCQLVYTDLCDAAARWHKRNKTNITATIYGCSLIVLIYYLDHLHHPASPVNKYGTPRIKFFDNETIKELARGDRRPPRKTGEPFGYAEFRSRSETCYVIAPERPASAVFNIYVPHIKNLIGNKLQCLPSQQRPMFQSLFDAHDKEVDKYCDSLQLSHQMIVSKQIELSETFGEMIDEVLRAATQRDSQPEDNPPPHYLNASNK

SEQ ID NO: 3056 - protein, 112 aa, Zea mays
MESTVERISSSVQSWVKDHELAAIGGVWAAAVGTSVAYSRRKAPQRGTGLRLIHARMHAQALTLAVLGGAALFHYYGDGGRRKRADDIDLDFYSQLPPATDADGNENQRWSW

SEQ ID NO: 3057 - protein, 529 aa, Zea mays
MASLNQHRSMATDRELFRTVRQAALNHARQLYHRLVRRLPHLLAVTLVVGAVQLVPPSSAPLPPLGALLREAAARARADAGLVAAAAAGLAAAACAYAASRPRPVYLVELAAYRPGPAHRATRAESVRHFARAGRFTDESVAFQTRMLERAGVGDATHFPASILAFPVDMSLRAAREESEAVVFGVVDGVLAAAAVRAADIGVVIVNSSLFSPTPSFTSLLVSRYGLRHDVVTHNLSGMGCSASIIAIDLAKHLLQVHPETYALVVSTENITLNAYLGNHRPMLVTNTLFRMGGAAVLLSNRRADRARARYRLVHTVRTHRGGASDESYACVTQEEDAEGNVGVSLSRGLMSVAGDALRSNITALGPLVLPLSEQLRFLAAALLRRVAAVKPYVPDFKLALEHFCIHAGGRGVLDELERSLGLSAWHMEPSRMTLYRFGNTSSSSLWYELAYCEAKGRIKRGDRVWQIAFGSGFKCNSAVWKALRTVDDAGRRDTNPWADDIHDLPVHVPKVSPFASSDQAPPTNAQHA

SEQ ID NO: 3058 - protein, 415 aa, Zea mays
MAFNKIKVSNPVVEMDGDEMTRVFWKSIKDKLIFPFVDLDIKYFDLGLPHRDATDDKVTVEAAEATLKYNVAIKCATITPDEARVNEFGLKAMWKSPNGTIRNILNGTVFREPIICKNIPRLVPGWTKPICIGRHAFGDQYRATDAVIKGPGKLKLVFEGKEEQVELEVFNFTGAGGVALSMYNTDESIHAFADASMATAYEKKWPLYLSTKNTILKKYDGRFKDIFQEVYEAGWKTKFEAAGIWYEHRLIDDMVAYALKSEGGYVWACKNYDGDVQSDFLAQGFGSLGLMTSVLVCPDGKTIEAEAAHGTVTRHYRVHQKGGETSTNSIASIFAWTRGLAHRAKLDDNARLLDFTQKLEAACVGAVESGKMTKDLALLVHGSSNITRSHYLNTEEFIDAVADELRSRLAANSNL

SEQ ID NO: 3059 - protein, 491 aa, Zea mays
MAGRDRRGAFLASSSSSGSGSGRRAPEHEWWPRSPAWSRPLSDSGGARGRKSGSSTSSSSFRSLFRSIGVWFSSLSTASPSPASSSMKQKSRDAGAKKPPLPGYAGTKTSARGLYSGGGGGRQHRPSFQNSVFSIEEILSATNNFSPALKIGQGGFGAVYKGVLPDGTVVAVKRAKLRMQNPHVDVEFRSEIKIMARIEHQSLVRFYGYMECGEERIVVVEYVPNGTLREHLDSKRPPAIAAALLPTPSAISHLARTNSNQAGCNGRFLDFGTRLDIAIDVAHAVTYLHMYSDHPIIHRDIKSSNILLTDSMRAKVADFGFARLGAGLGAGGEATHVTTQVKGTAGYLDPEYLKTCQLTDRSDVYSFGVLLVELASARRPIETKREMKERLTARWAMGRFIGGASADVLDPHLARTPAADRALEAVLELAFRCMGPVRQDRPAMSDCCRALWAIRKTYRDMLAADATPQFSDRRATTSSSSADSSGDLWRI

SEQ ID NO: 3060 - protein, 439 aa, Zea mays
MVGKLPQHRHHHGSSSLGAEELNLLHMARGGSPPDGGGGGGESRGALGQWKCRLLGSLRPCRARCVVCLQVQHVTGLPPAAEGHGLVVGWRSKGGEGEHTAPARVARGAAAFDEVFLQHFTAGSATLRGFTVWAALLDAPADNGDLGAFPVDLAEVAAAAAETSNSNASKFGGKALSFPLGGAAAGAVLSVSVYCRVMDQHEDSHGAANNNAREKKKNKGKAGSYASCLPDLSCLRNRQVAAASGGSARRAPSIRSDRGGFITIENSMSEIIGGGGAAFGVAEDVDEGAEGAGFITMEEGRVSSRRPLTPDTVASEEEDEKPCLLMELSSEEAAVDVEKVEDEFLAMLEDRYLARSKEIEKGLGVSLDIGLDLGLDLDSLIKDAEMELAKAEQAWKSKVGAAIVEEEEYRELVRRWSARETASHHSAGCSWGFGFGSPI

SEQ ID NO: 3061 - protein, 1016 aa, Zea mays
MAARSSAAAVAVLLLAAAGAAAAAGGAEGDGDGQALMAVKAGFRNAANALADWDGGRDHCAWRGVACDAASFAVVGLNLSNLNLGGEISPAIGQLKSLQFVDLKLNKLTGQIPDEIGDCVSLKYLDLSGNLLYGDIPFSISKLKQLEDLILKNNQLTGPIPSTLSQIPNLKTLDLAQNKLTGDIPRLIYWNEVLQYLGLRGNSLTGTLSPDMCQLTGLWYFDIRGNNLTGTIPEGIGNCTSFEILDISYNQISGEIPYNIGYLQVATLSLQGNRLIGKIPEVIGLMQALAVLDLSENELVGPIPPILGNLSYTGKLYLHGNKLTGHIPPELGNMSKLSYLQLNDNELVGTIPAELGKLTELFELNLANNNLEGHIPANISSCSALNKFNVYGNRLNGSIPAGFQKLESLTYLNLSSNSFKGQIPSELGHIVNLDTLDLSYNEFSGPVPPTIGDLEHLLELNLSKNHLTGSVPAEFGNLRSVQVIDMSSNNLSGYLPEELGQLQNLDSLILNNNSLAGEIPAQLANCFSLVSLNLSYNNFSGHVPSSKNFSKFPMESFMGNLMLHVYCQDSSCGHSHGTKVSISRTAVACMILGFVILLCIVLLAIYKTNQPQLPEKASDKPVQGPPKLVVLQMDMAVHTYEDIMRLTENLSEKYIIGYGASSTVYRCDLKSGKAIAVKRLYSQYNHSLREFETELETIGSIRHRNLVSLHGFSLSPHGNLLFYDYMENGSLWDLLHGEAGFLSSLSFFFLNSCRFVLPITHGPRPFPGPSKKVKLDWDTRLRIAVGAAQGLAYLHHDCNPRIVHRDVKSSNILLDGSFEAHLSDFGIAKCVPAAKSHASTYVLGTIGYIDPEYARTSRLNEKSDVYSFGVVLLELLTGRKAVDNESNLHQLILSKADDDTVMEAVDPEVSVTCTDMNLVRKAFQLALLCTKRHPADRPTMHEVARVLLSLLPPAAKPPASKAAAASAAAGDYTRFLATAADLRRGGVADDDTGDNSSSDEQWFVRFGEVISKHTLS

SEQ ID NO: 3062 - protein, 264 aa, Zea mays
MAAATMAITSRALVGKPAAGTRDVFGEGRITMRKTAAKPKPAASGSPWYGADRVLYLGPLSGSPPSYLTGEFPGDYGWDTAGLSADPETFAKNRELEVIHCRWAMLGALGCVFPELLARNGVKFGEAVWFKAGSQIFSEGGLDYLGNPSLVHAQSILAIWACQVVLMGAVEGYRVAGGPLGEVVDPLYPGGSFDPLGLADDPEAFAELKVKEIKNGRLAMFSMFGFFVQAIVTGKGPIENLADHLTDPVNNNAWAYATNFVPGK

SEQ ID NO: 3063 - protein, 691 aa, Zea mays
MAAVAPPPAPAPAPVPAPAPATVPVADQTTDLLQKLSLDSQPKAADATQPAAATAKKQGAAASQPLSVAIPPEPSITPVIQDFTDPNLFYLPAYYYGGYDSSMSEWDDYPRYLNSDGVEIAPAVYGDIYGYGYAPYGAYSPATSPVPTVDGQMFGAQHYQYPTAYFQPPTPVPSTTQSDLQSSKNPEKPAAKADPAKTTNGVPNGTAHSNSGTVPLASSQQNSSLTPDGTYRAPLLGGVPSAGYLDTTYGYDSTGAHFAWYDGSAYANGQQRATTTNHFPSSTFGNGSPARYQNKSTTTPQMGMQNRRPTTTSPAPTYPNRMYPSSRPYTQYGNSIKTGLPYGSNGYDSRIYGRWGLGMDNRYRPRGRNGYYGYGNESQDGTIELNRGPRSGRFKNQKLYGHTVTIAVKGQSLPSGESKDDSAVPDRAQFNRDDFPVQYDAAKFFVIKSYSEDDIHKSVKYNVWASTTNGNKKLDAAYQEAQSKGSACPIFLFFSVNTSGQFVGVAEMTGAVDFEKTLGYWQQDKWNGSFSVKWHIVKDVPNNILKHIILENNENKPVTNSRDTQEIHLEQGLQMLKIFKEHVSKTSILDDFAFYESRQKLMQDKRSKQQQVQKQVWDSRTPISVTGSEQQQEAANGKPNPSVPNGVPAEVKAAKASAENGTATPAISYAAKVAQAATEKPVLANGVAKTG

SEQ ID NO: 3064 - protein, 288 aa, Zea mays
MDTSWIMNGLGLAEKIRSATQSFTLRLGELFAKPRTKCTYCDCVIDISNVSLVWPALPAGVKFDPTDLEILQHLQEKSSLPNSVSHTLIDEFIPTIKEEEGICYTHPKNFPGIKMDGSYLHFFNRVLNAYDTGTRKRRRIIATGDICDGVVNGNSRWHKTGASKPVFDENGVRKGWKKILVLYKAPKKVGDRPERENWVMHQYHLGVNEDESNGEFVVCKVFYQSPLKKNGKSKTDVVVESDASVAKINPRTPMTDPPQRRRLNNSSCNTGQHTPTQALFGYRGIEVY

SEQ ID NO: 3065 - protein, 616 aa, Zea mays
MKLMRLGTRPDSFFTSGPVRSVYTEVATDLQIQVDHCLFRLHKFPLLSKCLLLQALCAGSDAAELPGFPGGAEAFEACAKFCYGVAITVGAHNVVPLRCAAARLGMTEAADRGNLAAKLDAFLASCLLRRWKDALAVLRSAAGRHAAECEELGVTSRCVEAVATLVVSDPGGGDAAAAPSSSASPWWARDVSDLGVDLFWRVMVAVKAAGTVKGRAVGDALKTYARRWLPAVAKSGYLVLEQTDISTAEWNSRLLVEKMVSLLPAERNAVSCSFFLKLLKAASVLGASPASKAELTRRVALQLEDASVSDLLIPSSCAGETLYDVDAVTAILEELALRQAAAAGVPEASPPHARGHRRSRSAESSEYEGARRSASAPASHGAMVRIGRLVDGFLMEVAKDPNLPLDKLIAIAEAVPDCARPEHDHLYRAVDTYLRVHPEIDKGSRKKLCRVLNCRKLSETASMHAARNELLPLRVVVQVLFFENARAAALSVRGANGRAAAGGVKALLAKTRREETDGEEKRLRGLAVAGAPGDDGNDWSVEGLKRAASRVSTLRMRLEEDADDEAFVHRARAGAGLVRSASARVRALCAIPAGKPRRMLSRLWPSSSSSAVTERR

SEQ ID NO: 3066 - protein, 1357 aa, Zea mays
MGKQAAVVLAVNGKRYEAAGVDPSTTLLEYLRTQTPVRGPKLGCGEGGCGACVVLVSKYDPATDEVTEFSASSCLTLLHSVDRCSVTTSEGIGNTKDGYHPVQQRLSGFHASQCGFCTPGMCMSIFSALVKADKAADRPAPPAGFSKLTSSEAEKAVSGNLCRCTGYRPIVDACKSFAADVDLEDLGLNCFWKKGDEPADVSKLPGYDSGAVCTFPEFLKSEIKSSVEQVNGAPVPVSDDGWYRPKSIDELHRLFQSESFDENSVKIVASNTGSGVYKDQDLHDKYIDIKEVPELSVINRSNKGVELGSVVSISKAIEVLSDGNVVFEKIADHLNKVASPFVRNTATIGGNIIMAQRLQFPSDIVTVLLAAGTTVTIQVVSKRLCLTLEEFLQQPPCDSRTLLLSIFIPYWSSDGITFETFRAAPRPLGNAVAYVNSAFLARTSVDAASRDHLIEDTCLVFGAYGTDHAIRASKVEDYLKGKTVSSTVILEAVRLLKATVKPSEGTTHPEYRISLAVSFLFTFLSSLVNNESTKVNGPNGSCSNGATNGALEHSPEKHLKFDSNDLPIRSRQEIFLTDEYKPVGKPIKKAGAEIQASGEAVYVDDIPAPKDCLYGAFIYSTHPHAHVKAINFKSSLASQKVITVITAKDIPSGGQNIGSTFPMMGDEALFADPVTEFAGQNIGVVIAETQKYAYMAAKQAIIEYSTENLQPPILTIEDAIQRNSYFQVPPFLAPKPVGDYNKGMAEADQKILSAEVKLESQYYFYMETQVALAIPDEDNCITIYSSTQIPEVTQNVVAKCLGIPFHNVRLISRRVGGGFGGKAMKAIHVACACAVAAFKLRRPVRMYLDRKTDMIMAGGRHPMKVKYSVGFKSDGKITALHIDLGINAGISPDVSPMLPPAIIGALKKYNWGNLAFDTKVCKTNVSSKSAMRGPGDVQGSFIAEAIIEHVASALSVDTNTIRRKNLHDFESLVVFFEDAAGEASTYSLVTMFDKLASSPEYQRRAAMVEHFNRSNKWKKRGISCVPITYEVNLRPTPGKVSIMNDGSIVVEVGGVEIGQGLWTKVKQMTAFGLGQLCPDGGESLLDKVRVIQADTLSMIQGGFTGGSTTSETSCEAVRQSCVALVERLKPIKENLEAEAGTVEWSSLIAQASMASVNLSAHAYWTPDPTFRSYLNYGAGISEVEIDVLTGATTILRSDLVYDCGQSLNPAVDLGQVEGAFIQGVGFFTNEEYTTNSEGLVIHDGTWTYKIPTVDTIPKQLNVELINSARDQKRVLSSKASGEPPLLLAASVHCAMREAIRAARKEFSVCTGPANSAITFEMDVPATMPIVKELCGLDVVERYLESMSTAGPTTTAKA

SEQ ID NO: 3067 - protein, 295 aa, Zea mays
MAGEGNGDEGWRRSGIEVSALQFGYDGQPPLFARFNLCVAPGSRCLLVGANGSGKTTLLKILAGKHMVGGRDVVRVLNGSAFHDTQLVCNGDLSYLGGSWSRTIGSAGDVPLQGDFSAEHMIFGVDGVDPVRREKLVDLLDIDLQWRMHKVSDGQRRRVQICMGLLHPYKVLLLDEITVDLDVVTRMDLLGFFKEECEQREATIVYATHIFDGLETWATDFAYIQEGELRRSGRYSDIEELRSAKNLLSVVESWLRSETKLPKKEPPPRPETQARRSSPFDASPFRSSRHMAYYR

SEQ ID NO: 3068 - protein, 135 aa, Zea mays
MSSSRRSSSPDSNDTTDERKRKRMLSNRESARRSRARKQQRLEELVAEVARLQAENAATQARTAALERDLGRVDGDNAVLRARHAELAGRLQSLGGVLEVLQMAGAAVDIPEMVTDDPMLRPWQPSFPPMQPIGF

SEQ ID NO: 3069 - protein, 328 aa, Zea mays
MGSSSNTNTSGGASDKEEKKKEDKIKGKDSSGPSFKENERVLAYHGPLLYEAKVQRIENHEDEWRYFVHYLGWNKNWDEWVANDRLLELTEENVRKQQELDKNQVVDKTMKSGRSTQHKPKVSNADAKADKDDTKSLISVKGKKRKSQLGTEIQDKEKRSSHSLLVLQFPLPLKKQLVDDWEFVTQMGKLVKLPRSPTVDDILKKYLEHRAKKDGKINDSYAEILKGLRCYFDKALPAMLLYKKERDQYAEEVKGDVSPSTVYGAEHLLRLFVKLPELLASVNMEEDALNKLQLKLLDVLKFLQKNQITFFTSAYDGSCKGADEDKTK

SEQ ID NO: 3070 - protein, 36 aa, Zea mays
MASPAAAWERPRHGHGGRKHGPLSGPPRRRMLWRRA

SEQ ID NO: 3071 - protein, 371 aa, Zea mays
MASRGSMTCSLQLAVLVSAAIALGFGVRAGEAQLSSEYYGQTCPVVHRVARRVLKKAHEADVRIYASLTRLHFHDCFVQGCDGSILLDNSSSIVSEKFATPNNNSARGYPVVDAVKAALEEACPGVVSCADILAIAAKISVELSGGPRWRVPLGRRDGTTANITAANNLPSPFDNLTTLQQKFGAVGLDDTDLVALSGKKKRGGEKTGDACLVILAPAQHDTWRHNDGGCIAGAHTFGRVQCQFVTARLYNFSGTNRPDPTLDRGYRAFLSLRCPRAGNASALNDLDPTTPDTFDNNYYTNIEARRGTLQSDQELLSTPGAPTAPIVGRFAASQKEFFRSFARSMVNMGNIQVLTGSQGEIRKNCRMVNGS

SEQ ID NO: 3072 - protein, 435 aa, Zea mays
MSISVNGQSVVPPGFRFHPTEEELLTYYLKKKVASERIDLDVIRDVDLNKLEPWDIQEKCRIGSGPQNDWYFFSHKDKKYPTGTRTNRATAAGFWKATGRDKAIYASPGARRIGMRKTLVFYKGRAPHGQKSDWIMHEYRLEAPVDAGAGAAHHLLLPAAEHPPYYTSPPQAPSSTTTATIRGAAGDQAAQEQEGWVICRVFKKKNLVHHGQSSGVKQQAAGDDHAASHTAAAAAHMDESSPSQCSSVTVISDHVHANVNDKQQQAQASLLMMHTHHSASSDDDALDHILQQYMGGGRQAPAPDTKPALLEQLDHLHHHLAAAPTTRAAAGFYYGKFMKLPPLEHAGLPPSPPPPGAREYGAAAAAGWDDDDDALDRLAAYDHLNGLSNDASKNMAAFFDVEPSAAAAAAVDGDLWSLARSVSALHADLTMNNNV

SEQ ID NO: 3073 - protein, 692 aa, Zea mays
MLVLINRYFRSRNSSPAGGGGEEMAPAAASSDHLCLPGCVPVRAKRASASASAAAAATVTTARASRHNFVRAAASGLLAGAHFTNHESLPPLPDAYAEFVAAFPQYAHGALARADAIRGEEYQHLDRHVCLDYTGINLFSHAQMSASLPSTSSAPPAWQPPFFDIAYKSTSLRAQVQCGDNAAGAEAGVGAAVTRRIMASLKIPGDEYAMVCTANRTAAFRLLAESYSFQPGKQLLPVYDYESEAVGAMADSARRRGAEVASATFAWPSMRIHGADLRKRLARGRRRGGGGRGLFVFPLASRMTGARYPYLWMSAAHQQGWHVALDACALGTKDLDTLGLSLIRPDFIVCNFFKVFGENPSGFAGLFVKRSSGLAALERSVIARSIGIVSIVPARRWSLHDGYSTELEHSRSFPMLAADPALDDADVETTSSFSGPLSSIAITRSRTLQSDAAENGDAHAPEIREVGSTAENGFYSEEPRAEETERLAKEEQDGEGRESVMEVECRGLDHADALGLIAIGNRLRCISNWLVVALQKLRHPHADNGHPLVRLYGPRVKFDRGPSLAFNVFDWKGERVSPLLVQKLADRHNISLTCGFLCNIWFSDKHEAERAVVLEHRVAGDPVAAGSAGGKRRKDAGGGDVGILVVNASLGFLSNFEDAYRLWAFVAKFLDADFVEKERWRYTALNQKTVEV

SEQ ID NO: 3074 - protein, 816 aa, Zea mays
MAHLLLHGTLDATILEADHLTNPTRATGGAPGIFRKFVEGFEDSLGLGQGSTRLYATVDLGRARVGRTRVITGDPVNPRWYEVFHIYCAHFASDVVFSVKAAQPIGATLIGRAYLPVRDLIAGQEIERSLDILDASKKRLPHGPKIRVRLRFQDVSADPRGWGRGVGGARYPGVPYTFFSQRPGCRVTLYQDAHTPDAFAPRIPLAGGRLYQPGRCWEDVFDAISNARHLIYITGWSVYTEITLLRDGSRPRPGGEATLGELLKRKASEGVRVLMLVWDDRTSVESLGMKWGFMSTHDAETAEYFRGSGVHCVLCPRNPDAGSSAVMGAQIAYMITHHQKIVVVDHEMPAKRSDRRRILSFVGGLDLCDGRYDTQFHSLFRTLDTAHHKDFHQPNLAGASIDNGGPREPWHDIHSKIEGPAAWDVLYNFEQRWRKQGGGIDLLVNLKAMADLIIPPSPVMFPEDQDSWNVQLFRSIDGGACFGFPSTPEAAAQSGLVSGKNNVLDRSIHDAYIHAIRRAKHFIYIENQYFLGSSFAWKADGIKPEEIEALHLVPRELSLKIVSKIEAGEHFAVYVVLPMWPEGPPASGSIQGILDWQRRTMEMMYNDISVALEAKRIDRDPRDYLTFFCLGNREVKMDGEYEPSGRPLDGTDYARAQNARRFMIYVHSKMMIVDDEYIIVGSANINQRSMDGGRDSEIAMGAYQPCHLNTKGQVARGQVHGFRMSLWYEHLGMLHDDFLNPGSLECVRRVNQMADRYWDLYAGDSLDADLPGHLLRYPVTVTKEGTVTELPGAKFFPDTQALVLGALSKLPPILTT

SEQ ID NO: 3075 - protein, 527 aa, Zea mays
MSAHLRLLSAAHVSAPTPTSLHRLRGPPPSPPAARLRLLLRPPRLGGSQARFAGAVRCSGSASAPAVARVGEDSDAAAGIWEQVRDIVVFAGPALGLWICGPLMSLIDTMVIGQTSALQLAALGPGTVFCDYLSYIFMFLSVATSNMVATSLAKKDEELTQHQVSMLLFLALACGIGMFLFTKVFGTQVLTAFTGSGNYELISSANTYAQIRGFAWPAVLVGLVAQSASLGMKDSWGPLKALAAASVINGVGDIFLCSVCDYGIAGAAWATMVSQVVAAFMMMQNLSNKGFRAFSFTIPSVRELLQIFEIAAPVFVTMTSKVAFYALLTYSATSMGAITLAAHQVMINVLCMCTVWGEPLSQTAQSFMPELVYGANRNLTKARMLLKSLVIIGAITGLTLGVVGTLVPWLFPSVFTNDQRVIQQMHRVLAPYFSVLLVTPSIHSLEGTLLAGRDLRYLSQSMGVCFSIGTLLLMLLRSKGSLAGCWWVLVLFQWSRFGSALLRLVSPTGMLFNKNFNQVEYIEAKTT

SEQ ID NO: 3076 - protein, 841 aa, Zea mays
MSVVGFDLGNESCIVAVARQRGIDVVLNEESKRETPAIVCFGDKQRFIGTAGAASSTMNPKNSISQIKRLLGRKYSDPEVQRDLASFPFRVTEGPDGFPLVHVRYLGEERTFTSTQLLAMVLSNLKGIAEGNLNAAVVDCCIGIPVYFTDLQRRAVLDAATIAGLQPLRLFHETTATALAYGIYKTDLPENDQLNVAFVDVGHASMQVSVVGYKKGQLKMLSHTYDQSLGGRDFDEALFKHFAAKFKEEYKIDVYQNARACIRLRVACEKLKKVLSANPEAPLNIECLMDEKDVRGFIKREEFEQISASVLERVKGPLEKALAEAGLTTENVHFVEVVGSGSRVPAIIKIITDFFGKEPRRTMNASECVARGCALQCAILSPTFKVREFQVNDGFPFSIALSWNGDSQNTPQQTLVFPKGNAIPSTKVLTFFKSSTFEVDVLYVDPNGLQIPQKISTYTIGPFQTSKGEKAKLKVKVRLNIHGTVTVDSAIMLEDDVEVPVSSANEAPNDTMKMDTDDAPSDPAVASDVNMQEPKSADTAEAAHAAENGPQDTEEKSVPMETDAKVEPSKKKVKKITVPVHELVYGALAAADLQKAVEKEYEMALQDRVMEETKEKKNAVEAYVYDMRNKLYDKYSDFVTSEDKEGLIAKLQEVEDWLYEDGEDETKGVYIAKLEELKKVGDPIELRFKEWEIRSSAVSQLVYCINSFREAAQSTDQKFEHIDMSEKRKVINECSEAETWLIEKKQQQDALPKHANSVLLAADLKKKAETLDRFCKPIMTKPKPAPKPQTPPVAENQAPEPQTPEQQQSGGESTASEGAAEEPRAEQMETDKPEGATDPSA

SEQ ID NO: 3077 - protein, 573 aa, Zea mays
MDAGDAMERGDRTPLLPESHGPKVQDDGGLQVPLLKDKKRAGSKAPAVVLGFECLESTAFNGISTNLVVYLETVLHGSNLSSASDVTTWFGTSFLTPVFGAVIADTFLGNYNTILVSLAVYLLGMMFVTFSAFLPTAAVLGGTSVFGAKTIAFLGLYLVAIGRGGVQSSLAPFGAEQFDDDNPADRESKASFFSWFYLCVDFGMIVSGLIIVWVQDNVSWGLGFGISTACLALAFAAFVLATPMYKRRMPTGTPLKSLSQVVVAACRKIALKVPADADMLYEVGDKVDAQQPKIAHTDEFSFLDKAAVVSESDMEEMRVSGETGSSSWTLCTVTQVEELKILVRLLPIWVTSVIVSSAYAQMTTTFIQQGSAMNMSILSVPVAAASMGSFEVVFLLTWVLLYSKVIVPVLRGFSTRGDGEPSQLQRMGAGRLLMALSMAVSALVEMKRLDSAARGEEVTIAWQLPQYFFMAGAEVFCYIAQLEFFYAEAPDTMKSTCTSLSLLTIALGSYMSSFIYAIVAAFTATADSPGWISDNLNQGHLDYFFWTMAAMCTLNFVVYSAFAKNYKLKTVLS

SEQ ID NO: 3078 - protein, 407 aa, Zea mays
MAAALQATPLKTLSISRRRVGGAGARPRPMAASFRCSAAARSYNITLLPGDGIGPEVVAVAKDVLSLAGALEGVELRFQEKLVGGSALDATGVPLPDETLDAAKGSDAVLLGAIGGYKWDNNEKHLKPETGLLQLRAGLGVFANLRPAAVLPQLVDASTLKKEVAEGVDIMVVRELTGGIYFGKPRGFGTNDNGDDIGFNTEVYSASEIDRIARVAFEVARKRRGRLCSVDKANVLEASMLWRKRVTALASEFPDIELSHMYVDNAAMQLVRNPKQFDTIVTNNIFGDILSDEASMITGSIGMLPSASVGESGPGLFEPIHGSAPDIAGQDKANPLATILSAAMLLRYGLGEENAANRIEAAVTETLNHGFRTGDIYSPGTTLVGCKRMGEEVLKTVNSLKEVAAVN

SEQ ID NO: 3079 - protein, 75 aa, Zea mays
MELRAAATYISSWFSNDDDDDRGTSMMQLAEDSCRQLSSGRQARGHRRHRRRLLGSAMLCSFVHGVLASRACIAV

SEQ ID NO: 3080 - protein, 492 aa, Zea mays
MDTSHHYHPWLNFSLAHHCDLEEEERGAAAELAAIAGAAPPPKLEDFLGGGVATGGPEAVAPAEMYDSDLKFIAAAGFLGGSAAAAATSPLSSLDQAGSKLALPAAAAAPAPEQRKAVDSFGQRTSIYRGVTRHRWTGRYEAHLWDNSCRREGQSRKGRQVYLGGYDKEEKAARAYDLAALKYWGSSTTTNFPVAEYEKEVEEMKNMTRQEFVASLRRKSSGFSRGASIYRGVTRHHQHGRWQARIGRVAGNKDLYLGTFSTEEEAAEAYDIAAIKFRGLNAVTNFEISRYNVETIMSSNLPVASMSSSAAAAAGGRSSKALESPPSGSLDGGGGMPVVEASTAPPLFIPVKYDQQQQEYLSMLALQQHHQQQQAGNLLQGPLVGFGGLYSSGVNLDFANSHGTAAPSSMAHHCYANGTASASHEHQHQMQQGGENETQPQPQQSSSSCSSLPFATPVAFNGSYESSITAAGPFGYSYPNVAAFQTPIYGME

SEQ ID NO: 3081 - protein, 790 aa, Zea mays
MLPRCCRRRSGASCLAVLLLLLLHAGAASAQGALARQDVAALHGLRASLGVRASDWPDRADPCTFWSGVVCRAGRVAELRLSGLRRTRAGARSAAFAVDQLPRLAALQAFNASGFPLPGRIPSWFGRGLPPSLAVVDLRSARVNGELPVDLGMSGNLTTLVLSGNNLSGPIPLSLLSIAGLRVLDLSANNLTGPLPNVSFSGSGGAGVLFNASGNALYGAVGDATGSLRKRFWVVDVSDNYFDQVLGTGFQNGTDGVVDLRMNCLSGAASQRTRGDCEAFYTRNGVRLALDPKPPSPLPEPQPPQVLMPSTKKRGGKWKFVLTGVLGGAAILVTLGLSVLVFCLLRRKGRKPRGRGVEQTEEGIRSGRRSSSVNPVTMSPMASPRASGSPKGVPIITDEFTYEQLHHAAGGFGDDNLVKHGHSGDMYYGVLESGFQVVIKKIDLKTRKKCQGELSFLTKHTHGRIVPLLGHLAKDEEELLVYKYMAKGDLTTALHKKSVEVEQGLRSLDWITRLKIAIGVAEALCFLHDECNPPLVHRDIQASSVLLEDKFEVCLGSLSEICTQQSAGSQSFFSRILRSSKSLDKNIPGPPASCSYDIYCFGKVLLELITGNFGASGSTNADSEEWLARTLDYINANDKEGVSGIVDPTLVVDDDHLEEVWAVSIVAKTCLNPKPSRRPLARYILKALENPLRVVREQEEFQSSPSHLRSTPSQGSWRFAFHGNKYHSWEAMPTSGQALARKNTAKSQGTEGSDEDEENSFSFKRASRDDFPDPIEFEGGVVVKEYPQTS

SEQ ID NO: 3082 - protein, 177 aa, Zea mays
MADSSAPTRVMMAVNESSLKGYPHPSISCRTAFDWTLSKLVRSNPGGFHFLFVHVQVPDEDGFDDMDSIYASPEDFHQMKQRDKIRGLHLLEYFVNQCHQLGIKCEAWIRHGDPKEVICSEVKRVQPDLLVVGSRGLGPFQRVFVGTVSEFCVKHAECPVITIKRNATEAPQDPVDD

SEQ ID NO: 3083 - protein, 157 aa, Zea mays
MSLALSRMMLDRFFPDAAGGARPPTDWKETRDAHVFRMDVPGLAREQVAVELVDGRVLRVRGGGGKQDGDGAAAGHEEEEGGGDGGGDASVRWHCRERAGARAFETQFRVPDDAAADEARAAMADGVLTVTVPKRKGGSGKKRRHGGSGPVCCKFWP

SEQ ID NO: 3084 - protein, 508 aa, Zea mays
MSFLRSLADSFSSLLFSSGGGAVSMDAAGAAPSPAAVVGERVAVKLRGYFDLAKEEIDKAVRAEEWGLPDEATAHYRNAMRVMLEAKAARVPDAVSSSERGQVRVYQEKIAKWQAQVEERLRVLGQRSGEGATAAEVPKKVAANNPIIRTAKTASNSIQRSPLQNSPTFNRGGQASTHQKIGSGASRPVQKAGGNYDDKLVEMINTTIVDRSPSVKWDDVAGLDKAKQALMEMVILPSKRRDLFTGLRRPARGLLLFGPPGNGKTMLAKAVASESEATFFNVSASSLTSKWVGEAEKLVRTLFMVAIDRQPSVIFMDEIDSVMSTRLANENDSSRRLKSEFLIQFDGVSSNPDDLVIVIGATNKPQELDDAVLRRLVKRIYVPLPDPNVRRLLLKNQLKGQSFKLSNHDFERLAVETEGYSGSDLRALCEEAAMMPIRELGPQNILTIKANQVRVLNSLNIKFTRSEFFSLLKQKLKWTSSCSIFTDNIPYISGCFPAKLWNVSVRST

SEQ ID NO: 3085 - protein, 159 aa, Zea mays
MYQAIPYSSARAWLMPAAAAEAGVAAVKPEPVATVAEPAAEEERARPDAAAGDDDDGGRAEVGRAVAERPVLVVGRRGCCLSHVVKRLLQGLGVNPAVHEVADESALAGLVPAGAGAAAGALPAVFVGGRLLGGLDRLMAVHISGELVPILKKAGALWL

SEQ ID NO: 3086 - protein, 853 aa, Zea mays
MLRAKQLSTLTQCARSFYLNGSRCGSTDGASCTCPEDETYAPKRQTASAIEQNSHSTHRTFVKIQPPLQDATRATGHPVPAVHATTSTSGKEAASSNRSNHPHSHHQIIRSDYVQPSKQTARSISQSGIAGAGVYSELVNIRSSSNNGSTDQAPQMGTNYSYQILSDNHSSNNRAQNQLNFPEGKMAYNPSVNNEFGKGYPRAGYAKPKQSFSGPSVMVSSSPSQIRSQGHPGLPPAKYHSNHFNSDARQDDVQTRNPSGPNVFSGSGNKIQGSTGRVKAHSGGPQSNLRSLKLLRSVEQYYHTLQQMKWGPMTEHVLDNLHCKIDAFQANQVLKLLHDHTVALGFFQWLKRQPGFKHDGHTYTTMIGILGQARQFGVLKELLDEMSRAHCKPTVVTYNRIIHAYGRANYLKEAVKVFEEMQEAGYEPDRVTYCTLIDIHAKAGYLDIAMDLYGRMQEVGLSPDTFTYSVMVNCLGKGGQLAAAYKLFCEMIENGCTPNLVTYNIMIALQAKARNYENVVKLYKDMQVAGFRPDKITYSIVMEVLGHCGHLDEAEAVFIEMRRDWAPDEPVYGLLVDLWGKAGNVDKALGWYQAMLQDGLQPNVPTCNSLLSAFLKMNRFQDAYIVLQNMLARGLVPSVQTYTLLLSCCTVGQAQMGLCCQLMAITGHPAHMFLLYLPDAEAGGQNVRDHTGYFLDMMHSEDRESKRGLMDAVIDFLHKSGLKEEAGFIWEVAAQKNVYPDSVREKSSSYWLINLHLMSEGTAVTALSRTLAWFHRQVLTLGTGPERIDIVTGWGRRSRVTGSSLVRQSIQKLLNLFESPFFTTRGNTGCFVGCGEPLNKWLHNPYVERMHLL

SEQ ID NO: 3087 - protein, 201 aa, Zea mays
MLGCFSRLRRPTTAAPEPMPAASDDASTSTASAAGSTSPCSWSSSARCKDDEDHGGGAVGKDPSALSEPGLSSAIASRRFFLSSPGRSNSIVDSSAHGGGGGAAAAPALDVGVGAAGVAVPTYSPDPHADFLRSMEEMAAALRLDARRRGDRARLHELLLCYLALNDRRAHKYVVSAFTDLLLRLTAAAAAANLSDDDRHE

SEQ ID NO: 3088 - protein, 692 aa, Zea mays
MVNFGKKLMADQLEEWREYYINYKMMKKKVKQYVQQTQTGGKNRDQVLKEFSRMLDDQIEKIVLFLLQQQGHLARRIENLGEQRVVLMERSDVSQICQIRQAYREVGYDLVKLLRFLDSNATGIRKILKKFDKRFGYKFTDYYVSTRANHPYSQLQQIFKQVGVVAVVGALSRNLSYLQDHQGSLANIYDYPSLILKDPVIEQINHSVQKLTHSTSFLQFLGQHALIVPGDMQSGSDLGDDKDYHFLSLLLNLVNTFLYMVNTYIIVPTADDYSVSLGAAATVCGVIIGSMAVAQIFSSVYFSAWSNRSYFRPLVFSCIMLFLGNLLYALAYDLNSLTVLIAGRLLCGLGSARAVNRRYISDCVPLKTRLQASAGFVSASALGMACGPALAGLLQTKFKIYGLTFNQNTLPGWVMCLAWIAYLFWLWISFKEPGHIATENSVSTQSSDSGRRVSGNLEGGLGEPLLIDAKAGQDEDDEDNDDPEESHTPATSLAAAYRLLTPSVKVQLLIYFMLKFAMEILLSESSVVTTFYFKWTTSTVAIFLAVLGLTVLPVNVIVGSYVTNLFQDRQILVASEIMVLIGIVMSFCFTPHYSVPQYVTSALITFVFAEVLEGVNLSLLSRVMSSRLSRGTYNGGLLSTEAGTLARVAADMTITAAGYLGQGRLLNATLLPSLVICLASIVATFCTYNSLY

SEQ ID NO: 3089 - protein, 770 aa, Zea mays
MRRGRSIRRELSCWASHPFPRYLPAQALPSRFLLCSTRSRPTMPHQGSHRPGAPVQGDPVFPRATSTVLPDPSRFFAPPLLAAPLPTNSFFQNFVLKDGDMPEYIHPYSVRSPGGGALDVCYPSRVHSPSSVTQTFVADLTVSDAAAGSAQRHVVSAFDDLSVTLDVSPSLRAHLVRGCPYVTVTTTAGPIDVSVSSVHAFVELVGSRSSHHGSPGTKWRLRMDSGQTFLLYASAPIHLAQASPTQLSATAFAGAIRVAYLPDASMEPVLDRYSRCFPTAGHAALDPIHRPFRVDYAWHREGPGELLMLAHPLHLRLLALAAADHGENRAARVLYGFRYRSIDGDMVGVVGGCWTLRADPVPPAWHSTRGVRADGVAEVVAALRADVGALAPAAVTTTSSYFYGKAVARAARLAVVAEEVGCADVIPAVREFLTATVTPWLDGSFQENGFLYDATWGGLVTLQGLSDSSADFGFGIYNDHHYHLGYFLYAIAVLARLDPGWGREHAPQAYAMVADFMTVSCNKAGDGGGFFTRLRMFDLWTLHSWAGGLAAIPDGRNQESTSEAVNAYYSAALVGLTYGDARLASLGATLAALEMLAAQTWWHVRDGEGMYEEDFSGSNRVVGVLWANKRDSGLWFAPPEWRECRLGIQLLPLLPISEALFPDVAFVRDLVAWTLPALDRDGVGDWWKGFVYALEGIYDTEAALTKIRALTAHDNGNSLTNLLWWLHSRGPAVTSSGTGTPGSGSGVAAGTATDSDSGSGGQHEQWRRQA

SEQ ID NO: 3090 - protein, 698 aa, Zea mays
MPRPMASSSARGRAKDSDPSSSSAAADSSMASLIERATSTTAHAVDPVLLRAIKSSARASDAAIRDAFRLILSLMSKPHSHVRLLAFSIADELFMRSKLFRSLLADSLDGFLPLAVGFRRANPLPPPTTSAALLRKAAVQALERWHHLFGAHYRQLRLAVEYLKESARVQFSGLRATVDARAAREARMQEIYAGKVEQLRENLASIKAEIRSTIDEIRNGLEIIRAEHKKFEGYYVDDEEEIASLSMRSIRTASLMAGEWVPETQENEAVFDALREAHRLLVSKHLVTVQEWITVLVRVNLPDNRFRDSALKDFIDVKNEIRAVRDHCSELGLDLDNFHRRKGDQEEEDNEFWVEGNIEAPNRARVQSSLDVASTSKDTEKGKWVVGGVCHIGKAPVAANGTRNLDPEKSKLLAEAPVLPWSSVLDRWGSSGDVHVNQRGLEVESHWGRVDNDATIPAAKIAELNVHCSIYREAPVEILPCHAPLKKGGLCQRRDLRVCPFHGPIVPRDAEGNPIEQNSGSSDAEVNPVEHLDIGGHSNELNGISDDDYMEGTSSRMTGVNNDYGDIAGTCDLGKITAEQLARQSVKNVRKREMDRKAQERAQRARIRQHNEDVLRNAALASTSYSAAAYEQPTEAHGRRGRRGKAKAPTLASMLKKKVTTKDRIAERLLNTRATDATVRDVSHNEDMSYREAFPNQW

SEQ ID NO: 3091 - protein, 436 aa, Zea mays
MGNALGCAGLGERLAAGARDGDAAEVRRLLDANPGLARCAAFGSLSSPLHLAAAKGHHEIAALLLENGADVNGRNIYGQTALMQACRFGHWEVVQTLLLFRCNVSKADSLSGRTALHVAAAGGHVRCARLLLAGAGSGRSKLVNRAASGGGGGVTALHLAALHGHADCVHLLVDERADVAARTLPCAAPPMASVGAGSAPLHYAAAGGEVKCCQILVSRGADRAAVNCNGQVAPGGRGQDVGVPLAGARPVAQVSAAHPQVPALRIPLVAARQRHHPREVRTHRRFNKNHHEHFLNMDGWIDDTCRDCGLALNMSSLPMDTMDGGADDGDACAVCLERPCNVAAEVCGHELCVKCALDLCSVIRSYDAPGIAGTIPCPLCRSGIASFRRRAAAAEAEPGANAGDRQASSSPHKKRSTESDQDGLPLVCAPPAVMSS

SEQ ID NO: 3092 - protein, 346 aa, Zea mays
MRPKYLTGKWPSWPCFWRLPAARGEWRQGEKEAAAAAAAAPSARFLPPPPASPLRVRAPPGVASLHLWAAGTYVRGEPHASLSPLGMDAGGEKCGDAAAEGGDLYAVLGLKKECSEAELKVAYRKLAKKWHPDKCSSSSSVKHMEEAKEKFQEIQGAYSVLSDANKRLLYDVGVYDDEDDEESMQGMGDFIGEMAQMMSQAQPTRQESFEELQQLFVDMFQSDIDSGFCNRTAKAHQFQGPAKSRTCSTSPSSSPSPPPTTAKDAEVPSCNGFNKRGSSALDSGKPPKPVEGGAGQNQAGFCFGVSDTKETPKLPGQNASRRRNGRKQKLSSKHDVSSEDETAAGS

SEQ ID NO: 3093 - protein, 666 aa, Zea mays
MDEPEKVRGREDAASGREAGGAEEAGDGFQLVIHGKKKKRAASGQDCGTAGSGSGAGAGPVRALTREKGAAPAPGAKAKVPFHDPSIPRPQDVYKIRVDNYKPFEHVWLERSEDGTRRVHPLENLPVEQFVDRNVPDREPVKPADLEDTPFTLVQDHKGLTELAKKLKSVTEFAVDLEHNQYRSFQGLTCLMQISTRTEDFIVDTLKLRIYIGLYLQEPFKDPTKRKVMHGADRDIMWLQRDFHIYVCNLFDTGQASRVLQMERNSLEHLLLHFCGVTAKKEYQNADWRSRPLPDEMIKYAREDTHYLLYIYDLMRQRLQRESTFENDLLLEVHKRSNEICLQFYEKELLTDTSYLHIYGLQEHELDARQLAVVAALHEWRDRIARQEDESTGYILPNKALIEIAKQMPTDVGHLKRIVKSKYPYVESNLELIAYTVWNALEYSYAFEGIAEQLKKERLEQVALKSGQTSDEVTPLDADIDRSNFDSSDQSANVNVASGSRAGFMSEAALISSIHLEDKTQTMSSVKTSQTLLGQIRPVNKDVLSNNIHQQAIQDLSLTLKALKGNLASGGESNEQAGINVENFRSSVFPSRQLSGEVKPFYPNPGMHSENVWIQTTQTNETMKLCNTTYYRQLPGHSTESINQRSTGSFQSSVRRQSFPPSSYKK

SEQ ID NO: 3094 - protein, 638 aa, Zea mays
MAEPSPPPVSNAGLRILLSKDRPAPSPPPTAAVSSHADRDRIIGVFRSALSRNEPPETFSLQTVQEAIKPQKETVLVLEENQSLENALRTLLQELVSSAVQSDKKIMQYGNSLDSGESNCLITRLLDIVLYLCERGHVEGGMVFQLLEDLTEMSTIKDCKDIFGYIESQQDVLGKQELFGRGKLVMLRTCNQLLRRLSKANDVVFCGRIIMFLAHFFPLSERSALNIKGVFNTSNVTKYEKDAMDGISVDFNFYKTLWSLQEHFSNPALTSTNPAKWQKFSSNLAVVLNTFEAQPLSDDDGKLNNLNEEEDAAFNIKYLTSSKLMGLELKDPSFRRHILVQCLIFFDYLKAPGKNDKEGPTGSMIEEIKSCEEHVKKLLEIIPPKGKEFLKSIEHILEREKNWVWWKRDGCLAFEKPPFEKKPGQAGARKRKPRWRLGSKELSQLWKWAEQNPNVLTDPDRVRMPSITEYWKPLAEDMDPSAGIEEEYHHKSNRVYCWKGLRFSARQDLDGFARFSDYGIEGVVPSELLPPEVNAKFSSKPAEKVKRTRKEDSKSVSAHQPREHQVAATPETDGGVDPEEGEGAAPMDSDNGAVGDSQKRSPGEVSGPESGQCEPEADADDNVRTETTSRDARAGEMK

SEQ ID NO: 3095 - protein, 229 aa, Zea mays
MAANLPDADAAGFKLFGKVIQPPDAQKRGADEGDDPTPQTALPPPPPPPPPPPPQQAPAAGGPGAEPLPCPRCGSRETKFCYFNNYNVRQPRHLCRACRRYWTAGGALRRVASASPGRRRPRPTARSAPVAAAASSAPAAAEEDSFGGQKDAAGLLCDRERVQFGRQSKRPPLQHARVTEQCRCRSSKKTCFITASNELVRVLANPTGVLNPSAASLLAPRCAALRAGS

SEQ ID NO: 3096 - protein, 2626 aa, Zea mays
MEAAAPDGAAQASPPPAEADRPPEPRPPPLPAAGTHDPHFLSSIIGDAAPPPPPPPLGQKRKRGRPPKRKDGAAVAAGPVVPAPAPALARAARRRQDEEEVVCFICFDGGNLVVCDRRGCPKVYHPACIKRDEAFFQSRSKWNCGWHICSSCEKAVHYMCYTCTYSLCKVCIKQGKFFSVRGTKGFCDTCYGTILLIECKDESATKVDFDDILSWEYLFKLYWLDLKGKLSLTLEELTTAKNRWNVPSTSARKEKEESSDDLYDANNDDDAGSDCSSGKRRRTNSRKKGQKRRKVNRDCSILEKKVELPLRNTESIPVEVPNERVPYPVHTKVPNGRVPMPVDTKVPNEPVSLAANTKWASPELLEFIGHMRNGDQSFISQFDVQTLLLDYIKKNNLRDPQRKSQIICDSRLHFLFRKARVAHFEMLKLLEMHFLTNETSTVTNSSQVTINLNSAHVDTNGHNDTAAKVSPDKRRRIYRKMERDTQVNLEDYAAIDMHNINLIYMRRSLMEDLVDDVKFSDKIHGGFVRIKISDVCQKQDIYRLVKVIGTHKVPEKYSIGKKMTNVALEILNLNKKEIITMDTISNHDFTEEECKRLRQSMKCDLISRLKVGDILEKAKILQYVRVNDWFENEKQRLGHLRDRASETGRRKELREYVEKLQLLNDSEERTRRIIEILELHVDSHMDPNYESAEETDEKGTVGKSVNQTRPDTTISRRISRYLSTVQNHPKKVSDSSHLPKSLSTESAICGSGARSLENSTANRTMYGAGPLSSSVVTMTNDTEPEKVWHYKDPSGNVQGPFTLLQLSNWTSYFPRDLRVWLTFESEERSLLLTEVLSKQQKDFTQAASHTSSKATLVGTGHTRNNPSVDQTNAFSPVGHSVVSSSGIPVQYNKYSVPERESVYSPDDSLSLSTSSVPPKDAYTVNSQAHCQNKHSVFIQSPGSSYGHTDLNHDGIQGGCSGESNHHHSSRALWSPTVAHVSCGRGNVESHQNQHVSWSESQHESKNGSQGGFVKDLNSRQDLSKNLPAQRIGKDVSSPLFAWSPAESRTASSQQEGSCLSSTTNPSFLDELHSSIASAKPKSCAPATPIEDRGSSSPSDMLSHEERVPICSPQSAPLASASDMCKMEEIMNQQRTLVVDTSNASVNQSPESRAFPVSSPDNQDIDREFPSPVPRSENKDIAVDSSELAPASPENITTNLPVSDTCKMEEVVSQQQVIGAVVSNSSDNHSPQSKVSPVSSNNEDTKHKYPSSTPRPENKNPAVDSLLSTSAAPENLTTTSTHDSDTCKMEVVNQPKTFEADASNAPLHQLPHSHSFLVPSDNQDIECECPGPTPRSDSEEALMNNSATTASASDTSKMEEFVNQQKTLEADSSNAPLNQSPHSHIFSVPSDKQDIERECPGPTQRSDTKEPLMNNSVLTSGPSEIQTTASAASDTCKMEESVDQPKALEADASNAPLNHHPHSHIFRVSSDNQDNQCEHPSPNPKSDSKEPLVDNSVLTSVVPGMLATTSASDKCKMEEFANQQKALEVDASNASFNQPHIFAVSSDNQDMERERPSPTPRSECKESLTENSVLTSLAPEILARSSASASDKCKTEEFVNQQKPIEADASNASLNQPHVFAVPSDNQDIERECPSPTPRSECKESFMENSVLTSAVPEIARSSVSASDTCKMEFVNQQRPIEADASNASLNQPRIFAISSDNKDIERECPNPTPRSECKESIMENSVLTSAAPEILAISSASASDTCKMEFVNQQRPIEADASNASLNQPHIFAISSDNKDIERECPSPTPRSECKESLMENSVLTPATPEILARSSASASDTCKMEEFVKQQRPNEADASNASLNQPHIFTVSSDNKDIERECPSPTPRSECKESLMENSVLTSAAPERSSASASDTCKMEFVNQQRPIEADAPNASLNQCRTFAVSSDTKDIERECPSPTPRSECKESLMENSVLTSAAPEILARSSASASDTCKMEEFVNQQRLIEADASNASLNQPHIFAVSSDNKDIERECPSPTPRSECKESLMENSVLTSAAPEILVRSSASASDTCKMEEFVNQQRPIEVDASNASLNQPPRCHIFTASSNNQDIERECPSSTPRSDSKEPFVDNLVLTSAVPGNLLTSSAVASDTCKMEILNKKITLEADASNAPLNQPPLSSVFASSSGDDQDNVCGRPSPNPRPEGEQPLMGNSGLISTVPRNLTSTSASASDICKMEILNEKRTLEANPSNGLITQSPQPKVFLVPSPDILECEFSSETPRHEFKEPVADSSGLTSAAHENLGTKPHVHSPDAFVPPKSGALTGELGDTKSDFKGEETIQKEQYFGSESIAATRENLLIDPSSGVESIDVSDVLDSLMEERSGTSYMPGSIEDFLAEEEPQYSSPIALSPWGEPSYYQGDAVDSALWGTQDLINDMWSLLSPRPMLQPSSGIGTEGKETFDINEVAVTHVSSDYFQKGSMFGEENVNQANLSAAADWMLPEQVPSIPNGMSTSSVDESTIVLGSQPSTNQSLDWGGTTWSIGQNASVYSNEKAEPSSKSYWEEPRKQETAKSSVSISGQAIGNNKGLDPRDNAANRGSRLSHHHRGRYSQISESWLLSSSHSRSRSDRFGSGGSSRSTSKGQSRG

SEQ ID NO: 3097 - protein, 450 aa, Zea mays
MALLKNSLMLPGRLRHAAAALTARRHAATLTEEYARRNYADNNSEYNTVIGSLVAQRRPYLLRDAYDDMMLDGVKPERETFHTLIVGTMKGSRLQDALYFRDQMKEMGLKPDVNLYNFLISTCGKCKNSDAAIMLLEEMKAHDVKLKGETYICLLNALASTGQTDQVYAIVSDMSAAGLGLNKFCYAGLITAFKNKTPTAEETMAKILDFVGQSKGWQYVERVSKDIAENIMMNVSEEELYNLPTAEYVNRRGGFVFKQHTVYHVALQACAELRSKETLEALLEMFNKDNRDGSTYDAYMVMQAMRCYLRCGDIDSAVKMFEEYSSSRSPPAELYATLAEGAMIGYTPRGMQLAQETIEKMTSRNFFLNAKMGTDLLLAAAGETAGGYTTANYVWDLLQSRKITPTLPAVEAYHKGLTAREIPSDDPRLLNVTRVLDNLKLRFGPRRNTQ

SEQ ID NO: 3098 - protein, 156 aa, Zea mays
MLRVDDLIAELCLLPARVLRKRKRKEFQTVELLVRMDCEGCERRVKKALEDMKGVSSVEVDQKQNKVSVSGHVEAPEVVERLRRRAGKEAKPWPYVPYEVVPHPYAPGAYDKKAPPGYVRNVLDDPDAAPLVRASSMEERYTTAFSDDNPSSCAVM

SEQ ID NO: 3099 - protein, 752 aa, Zea mays
MESTMEKPAVMDAARGGGGVGRAKSDHLAPSLSLSRTASAETVLGTAADAAKPAGFGRKRRSASVGGGNNNSHIRKSRSAQLKLDVEDLVSSGAALSRASSASLGFSFTFTGFTPPLQHMCSADPPSFSDDENLDIEAGTRRKKLVTEPTLPIYLKFAEVKYRVAGKGSPREILGGISGSASPGEVLALMGPSGSGKTTLLSILGGRAAAGGAVDGCISYNDEPFSKSLKRRIGFVTQDDVLFAHLTVKETLTYAALLRLPRTMTQQQKKERAMDIIHELGLERCQDTMIGGSFVRGVSGGERKRVCIGNEILINPSLLFLDEPTSGLDSTTALRIVQLLHDIAEDGKTVITTIHQPSSRLFHKFDKLILLGKGSLLYFGKASEAMPYFQSIGCAPLIAMNPAEFLLDLANGNTTDVSVPSELDDKVHMENHNLENNNSKIDYRPSAQDVHEYLVDAYETRVAFKEKKKLLAPLPISDDLKATITSSKREWGTSWWQQYSILFCRGIKERRHDYLSWMRITQVIATSVILGLLWWHSDPSTLKGLEDQAGLLFFIAVFWGFFPVFTAIFTFPQERAMLNKERAVDMYKLSAYFLARTTSDLPLDLFLPIIFMVIVYFMAGLKATATHFFLSMLTVFLSIIAAQGLGLAIGATLLDIKKATTLASVTVMTFMLAGGFFVKSVPPFISWLRYLSFNYHTYRLLLKVQYDPVPDILTTTRHMDSGGTEVAALVAMVIGYRVLAYLSLRRAKALGS

SEQ ID NO: 3100 - protein, 740 aa, Zea mays
MPPPRRALVTSLLRLRSFSSIAYPHPYPPAPLRRHQFVADPTTSTNRGVVGGIGGVGSGNGNILDPTQLLRDDPVAITASLWVSSFRAAASTSGSCTPAPPQPLTPFLSRLELWVLAYQKAYADETGSYLPRSSIPASTLASLLTLRNAVLDGRFRFGNRLTPILQSPRAANAPDPATLSKRKLRALLTTPGPSPFQDRVVQELLLLLLEPVYEARFSPKSFAFRPGRSPHAAIRTIRRSFAPYLWYIKGDLSPLLHSPDHALVVGALIRDVRDKKVVDLIRSALLTPVVTASDDAAVKKKKTKRKYQKKKVLPEGEPKPDPYWLQTFFGFAPEEAQTQPDWGHCGVLSPLLANVCLDEFDKWMEERIKEFYKPSKSDVVGGDDGIEQGNTSWPEFVPTTGPDKTRKVDYIRYGGHFLIGVRGPRADAAVLRKQLVEFCDQRFRIKLDNESLPIEHITKGVMFLDHVLCRRVVYPTLRYTATGGKIISEKGVGTLLSVTASLKQCIKQFRKLEFLKGDREPDPQPCFRMFHATQSHTNSQMNKLLLTMAEWYRYADNRKKVVNFCSYIIRGSLAKLYAAKYKLRSRAKVYKIASRNLSRPLKDKKGQSPEYHNLLRMGLVDSIDGLQYTRMSMVPDPDYTPLPFGWRPDHEKILLEYIKLTDQQTLEEQRNCIREDGLITPQDNISMLVWGYKKNAVLLPSKVSDAQGSTEDLGSDTDELDEKELGNEGNQSFQKLAEMS

SEQ ID NO: 3101 - protein, 1411 aa, Zea mays
MAATPAWDWEESLVFFLQPFFLHGVSAAAHLILALAVAGRLLFRRLSASRTKDGEVGGGDASRGVGRFRYWYGVSVCTTWAMGAFEVLLAVYSWYANGGAGWSRDAVVEQVDAAARAVSWLLLAAYLQFDFWWRRQRQERFPVALRLWLALFMLLSVVTVGVHAAMILDGSLVPGRSWALDAVSVTAAAVLLSVSAGFFGRKEGEGGGHASEAHEPLLNGAHEGSGDDDENSSSAADASLFTGAGFLSVLTFSWMTPLLGVGHRKTLVPEDVPGLEPGDSVAGVLPPFKANLEALTGDGGRSSRKAVTAFKLTKALLRTLRWHVAVTAFYTLVYCVAVYVGPYLIDSLVQYLYLNGDERYASKGQLLVLAFVVAKVLECLSQRHLFFRLQQAGIRARSALVAVLYQKSLALSSQSRRSHTSGEMINIVSVDADRVGIFSWYLHEVWQVPLQVVMAMFILYSTLGVASLAALGATVATGLATVPLGRMQERFQEKLMDSKDGRMKATSEILHSMRILKLQGWEMRFLSKIIELRKTEANWLKRYLYTSATMTFIFWGTPTFVAVVTFGACMLMGIPLETGKMLSALATFRVLEEPIYELPGTIAMVIKTKVSLDRIASFLCLDELPSDAVQRLPRGSSADFAVSVGNGCFSWEASPDAPTLKDLNFQARPGMRVAVCGTVGSGKSSLLSCILGEIPKLSGEVRTCGTTAYVSQSAWIQSGKIQENILFGMEMDRDKYDRVLESCALKKDLENLPFGDQTVIGERGINLSGGQKQRIQIARALYQDADVYLFDDPFSAVDAHTGSHIFKECLLADLASKTVVYVTHQIEFLPAADLILVMKDGRIAQAGRYDEILGSGEEFMELVGAHEESLTALDVVDAMNENEANVSSSPSSRIETPNLSRSLSLAEKKHGATNEAEGDDDDARSGQLVQEEEREKGRVGFWVYWEYLTQAYKGALVPLVLLAQTLFQIMQIASNYWMAWATPASKDAEPPVSAPTLLFVYVVLALGSSLCILVRSLLLATAAYKTATLLFNKMHLSIFRAPMSFFDSTPSGRILNRASTDQSEVDTNIADQMGTVAFSIIQLVGITAVMSQVAWQVFVVFVPVFAACVWYQRYYIDTARELQRLVGVCRAPIIQHFAESIAGSSTIRSFGKEDQFVSTNSRLTDAYSRPKFYNAGAREWLCFRLDVLSSLAFAFSLIFLINLPAGLIDPGIAGLAITYGLTLNTLQAQVVWSMCTLENKIISVERILQYMGVPAEPPLVMPENKLAQSWPSNGEIQLQNLHVKYAPQLPFVLKGLTVAFPGGVKTGIVGRTGSGKSTLIQSLFRIVDPAVGQIVIDGIDIRTVGLHDLRSRLNIIPQEPTMFEGTVRSNLDPLGEYSDDQIWEALDCCQLGDEVRKQELKLDSPGLNLIQ

SEQ ID NO: 3102 - protein, 293 aa, Zea mays
MRALARAASLLRRAAGSAPTTASLYHPPRNVGPCLVKNLPGFFFNGYSTLLAPPNEVLIPPELLSSRTVWTPDRELGQYEDLVARVTNFHNEDKGFMVLDGDVFDVPIRKDIVHRVVRWQLAKRQQGTHSTKTISEVSGTGRKPYPQKGTGKARHGTLRGAQFRGGATMHGPKPRSHAIKLQKKVRRLGLKIALSARTAEGKLLIFEDLEVPSHKTKNIVQYIRQMDDSKKVLLVDGGDIDKKLKLATQNLHYVNVLPSIGLNVYSILQHDTLVMTRAAINRIVERMHTPINR

SEQ ID NO: 3103 - protein, 411 aa, Zea mays
MNALAATSRNFKQAAKLLGLDSKLEKSLLIPFREIKVECTIPKDDGTLASYVGFRVQHDNARGPMKGGIRYHHEVDPDEVNALAQLMTWKTAVANIPYGGAKGGIGCSPGDLSISELERLTRVFTQKIHDLIGIHTDVPAPDMGTNSQTMAWILDEYSKFHGYSPAVVTGKPVDLGGSLGRDAATGRGVLFATEALLAEHGKGIAGQRFVIQGFGNVGSWAAQLISEAGGKVIAISDVTGAVKNVDGLDIVQLVKHSAENKGIKGFKGGDAIAPDSLLTEECDVLIPAALGGVINKDNANDIKAKYIIEAANHPTDPEADEILSKKGVLILPDILANSGGVTVSYFEWVQNIQGFMWDEEKVNAELRTYMTRAFGDVKQMCRSHSCDLRMGAFTLGVNRVARATVLRGWEA

SEQ ID NO: 3104 - protein, 510 aa, Zea mays
MFIESFRVESPHVRYGPTEIESEYRYDTTELVHEGKDGASRWVVRPKSVKYNFRTRTAVPKLGVMLVGWGGNNGSTLTAGVIANREGISWATKDKVQQANYYGSLTQASTIRVGSYNGEEIYAPFKSLLPMVNPDDIVFGGWDISNMNLADSMTRAKVLDIDLQKQLRPYMESMVPLPGIYDPDFIAANQGSRANSVIKGTKKEQVEQIIKDIREFKEKNKVDKIVVLWTANTERYSNVCAGLNDTMENLLASVDKNEAEVSPSTLYAIACVMEGVPFINGSPQNTFVPGLIDLAIKNNCLIGGDDFKSGQTKMKSVLVDFLVGAGIKPTSIVSYNHLGNNDGMNLSAPQTFRSKEISKSNVVDDMVSSNAILYEPGEHPDHVVVIKYVPYVGDSKRAMDEYTSEIFMGGKNTIVLHNTCEDSLLAAPIILDLVLLAELSTRIQLKAEGEDKFHSFHPVATILSYLTKAPLVPPGTPVVNALAKQRAMLENIMRACVGLAPENNMILEYK

SEQ ID NO: 3105 - protein, 489 aa, Zea mays
MGGFHFHHTWFKARKVFVRMLSNGGGASMACDISVDASDLSKRLCKLIISCRKASALEHELDHSGVRVTPEIAESVLKHLDNAGMLAYRFFEWARKQKRGVCAHTVRSYHTVVTSLAKIRQYQLMWDVVAIMRKEGVANVETFGIIMRKYARAQKLDEAVYTFNVMEKYGVAHNLAAFNSLLSALCKSKNVRKAQEIFDKMNNRFSPDAKTYSILLEGWGRAPSLPKMREVYSDMLAAGCQPDIVTYGIMVDALCKTGRVEEAVCVVQDMSSRGCQPTTFIYSILVHTYGVDMRIEDAVAAFLDMEKDGIMPDVVVYNALITAFCKVKKFENAFRVMDDMQGHGISPNSRTWNIILNTLISLGKDDEAYRVFRSMIKRCKPDSDTYTMMIKMFCENDKIEMALKVWKYMRLKQFLPSMHTFSVLINGLCDKGEVSQACVLLEDMIEKGIRPPGSTFGKLRQLLLKEGRKDVLDFLVEKMKILAQEPLFD

SEQ ID NO: 3106 - protein, 528 aa, Zea mays
MARGDGELELSVGVRGTGGAAAAAADHVAPISLGRLILAGMVAGGVQYGWALQLSLLTPYVQTLGLSHALTSFMWLCGPIAGLVVQPLVGLYSDRCTARWGRRRPFILIGCMLICLAVIVVGFSSDIGAALGDTKEHCSLYHGPRWHAAIVYVLGFWLLDFSNNTVQGPARAMMADLCGHHGPSAANSIFCSWMALGNILGYSSGSTNNWHKWFPFLMTNACCEACANLKGAFLVAVTRFYVFQQVFLVMCLTITLFFAKEVPYRGNQNLPTKANGEVETEPSGPLAVLKGFKNLPTGMPSVLLVTGLTWLSWFPFILYDTDWMGREIYHGDPKGSNAQISAFDEGVRVGSFGLLLNSIVLGFSSFLIEPMCRKVGPRVVWVTSNFMVCVAMAATALISFWSLKDYHGYVQDAITASTSIKAVCLVLFAFLGVPLAILYSVPFAVTAQLAATKGGGQGLCTGVLNISIVIPQVIIALGAGPWDALFGKGNIPAFGVASGFALIGGVVGVFLLPKISKRQFRAVSAGGH

SEQ ID NO: 3107 - protein, 597 aa, Zea mays
MAREATNAWPRPSPSARKRSKGKRAVLSPAPPTQAAATEMEAEASVPATDYVYDALPGLHLAFSPEETLDDAAAGQDEDDATATYAVFRNEITEAGDVLADIPAADFFSLDVSTSASVEPEPEPEPPSPAPTAAAATPSISRALEDQPPQGSERAWFRGGRRFRSPMLQLHKEILDFCDFISPSTEEQSSRAAAVQDVSDVVKHIWPQCKVEVFGSFRTGLYLPTSDIDVVIFESRVKTPQVGLYALAKALSQKGVAKKIQVIAKARVPIVKFVERKSGIAFDISFDIDGGPQAADFIKDAVKKLPALRPLCMILKVFLHQRELNEVYTGGIGSYALLTMLITHLQLVWGGKDILGYHRSKEHNLGILLVRFFDFYGRKLNNWDVGVSCNSSRTFFLKSDKDFMNHDRPHLLAIQDPMAPDNDIGKNSFNYFKVKSAFSKAYSVLTDANLFISLGHNRSILGTIVRPDSVLLDRKGWNNEDMLAEPWEPITQQFDTENDAVYNWHVIDEDEPLPRNSQSTSEDTSSSPSKKRKSPKSRRKSRKKSKATASGSSDVANGFRKDRSSKREAGSSKRRKGPKEYDRFTNTLPKYTHVSKW

SEQ ID NO: 3108 - protein, 554 aa, Zea mays
MELHLATIAHRPPLPVPARGHHLRRRLHHLPAPLSFQNTYSPSLSSPHHHRLSPTLRRHLRLPLLASQAPNSNPEPEPEPEPTGAKLLPLVISIAIGLAVRFLAPRPVEVSPQAWQLLSIFLSTIAGLVLGPLPVGAWAFLGLTAAVATRTLPFTAAFSAFTNEVIWLIVISFFFARGFVKTGLGDRIATYFVKWLGSSTLGLSYGLTLSEACIAPAMPSTTARAGGVFLPIIKSLSLSAESKPNHPSSRKLGSYLVMTQFQASGNSSALFLTAAAQNLLCLKLAEELGVIIANPWVSWFKAASLPALVSLLATPYLLYKIFPPETKDTPDAPALAEKKLKLMGPVTKNESVMIGTMILAVSLWVFGDAIGVSSVVAAMLGLSILLVLGVLDWDDCLNEKSAWDTLAWFAVLVGMAGQLTNLGIVSWMSNCVAKLLQSFSLSWPVAFCVLEASYFLIHYLFASQTGHVGALYSAFLAMHIAAGVPSVLSALALAFNTNLFGAITHYSSGQAAVYFGAGYMELPDVFRLGFITALANTLIWGVVGTIWWKFLGLY

SEQ ID NO: 3109 - protein, 142 aa, Zea mays
MSFSCHFPNCLTYKTSEEFVARVKEAMDREPQQLTPEQRYNLSWEAATERFMEYSDLDKVLNNEAAQPKQGRKRKNKRTSQPNLFDIMDGGLALAHRCLTGNEVLRLATEAIPGTRDYDKSNVWIWVSCLLKYNTLYMAGDD

SEQ ID NO: 3110 - protein, 166 aa, Zea mays
MAPRGRVELRRIEDKASRQVRFSKRRAGLFKKAFELALLCDAEVALLVFSPGGKLYEYSSSSIEDTYDRYHQFAGAGRKVNGHNNDNRDVAASDLQSRLKEIATWSKQNNAEESDANELEKLEELLTNALRNTKAKKMLAKENNGGAGASTSSQMLLYSAERATDK

SEQ ID NO: 3111 - protein, 1509 aa, Zea mays
MALASQPPWWLTTEACDLPSAPAAGLGEWVAFLFLSTCSQQMLLSAASAVFLVALLCLGAAKLISTRRRRHGGGALNGDKQPLLDRAGGRAGVRVGAGFVVALAASGVLAAFYASLLVLSLVNRGGGEGEALEAVFLALQCAAHLAAAAVVAHEKRFRAAAHPLALRLYWLAAPALTALLAGTSVARLVVAAARLPDDALAIAALVLSLPLPVLSILGSTGISVAVVNDATGAAEEETASNKATEKNVTPYATASWASRATWAWMNPLVQRGHRAALELSDVPTLAPSHRPERMHELFTLHWPSAWASKDNNPVRHTLFRTFWAQFLLNALLALLRLTVMYVGPTLIQSFVDFTSAGGQRPFGEGARLVATLLAAKCAEALCSHQYNFHCQKLGMQIRGALIVALYRKGLRLSCSARQKHGLGMIVNYMAVDAQQLSDMMLQIHYLWLMPLQVGVALGLLYTYLGPPVTSALIGVAGVMVFVLLGTRRNNRYQFSLMKERDQRMKATNEMLNYMRVIKFQAWEEHFNARIGRFRRLEFGWLSRFMYSISGNIIALWSAPVVVSALVFATCVLAGVRLDAGLVFTATSFFKILQEPMRNFPQAMIQASQAMISLQRLDSYMTSAELDEGSVERDPAAASGGMAVQVKDGVFAWDDEVDAGQEVLRGIDLDIRTGALAAVVGMVGSGKSSLLGCILGEMRKFSGKVKVCGSTAYVAQTAWIQNGTIEENILFGKPMHRERYKEVIRVCCLEKDLEMMEFGDQTEIGERGINLSGGQKQRIQLARAVYQDFNIYLLDDVFSAVDAHTGTEIFKECVRGALKNKTIVLVTHQVDFLHNADIIYVMKDGMIVQSGKYDELLQAGTDFAALVAAHDSSMELVESAAPASERELPLSRQPSSKNAASNGDSSSSSIVAPKAEKASARLIKDEERASGHVSFTVYKQYMTEAWGWWGPLVVVAVSVVWQCSLMASDYWLADQTSDGNETSFQPSLFINVYAIIAAVSVVLVAARSFIVAFIGLQTADRFFKQILNSILHAPMSFFDTTPSGRILSRASSDQTNVDLFLPFFVWMSVSMYITVISVLIVTCQVAWPSVIAIIPLVILNIWYRGYYLSTSRELTRLESITKAPVIHHFSETVQGVMTIRCFRKEENFLQENLNRVNSSLRMDFHNNGANEWLGFRLELIGSFVLCFTAVLMVTLPSNFVKPEYVGLSLSYGLSLNQVLFWAIWISCFIENKMVSVERIKQFTNIPSEATWRIKDCLPDSNWPTKGDINVIDLKFRYRHNTPLVLKGITISIHGGEKIGVVGRTGSGKSTLIQALFRIVEPSEGRIIIDGVDICTLGLHDLRSRFGIIPQEPVLFEGTIRSNIDPLEQYSDDEIWQALGRCQLKEAVASKPEKLDASVVDNGENWSVGQRQLLCLGRVMLKHSRILFMDEATASVDSQTDAVIQKIIREDFAACTIISIAHRIPTVMDCDRVLVIDAGLAKEFDRPANLIERPSLFGALVQEYANRSSDV

SEQ ID NO: 3112 - protein, 625 aa, Zea mays
MDNGFMDIPHPPLMNDPFVLVGCSAPSSTVENMGQSTLCMDGLNPAIVSCSHVNGNTQIMNDITARDDGSRLVLGLGPTPNFYSAVSTGSKQAQRLSGQSSTFTDSGMLRLGLHTDGGGAIQCLQGPNGALHSLGIVDEASTSTTVRSMGGYMPSLLFAPRSNPTVNETQVEIPDSLNLTHSTSNSQHIQRHLQFSPEPSAMTESSFGVSSDVVTATTTSERSHSRHPKKCRFKGCSKGARGASGLCIAHGGGQRCHKPGCHKGAESSSAYCKAHGGGRRCEELGCTKSAEGKTDYCIAHGGGRRCEHPGCPKAARGKSGRCIKHGGGKRCLVKGCIRSAEGKAGLCISHGGGRRCQYPDCGKGAQGSTLYCKGHGGGKRCVFDGCSKGAEGSTPLCKAHGGGKRCMFEGGGVCAKSVHGATEYCVAHGGGKRCSVPGCTKSARGRTDCCVKHGGGKRCKVENCGKSAQGSTDFCKAHGGGKRCTWGTGCEKFSRGKSGFCAAHGTLMARQREQEAAKNVGSMIGPGLFSGIVVSSATAASSMTNEHSSSGVSTASDCDGTVRSQSMIPPQVLVPRSMMPSWSTEPVDGGREGGHVVPEGRVHGGGLLSLIGGSFRNADLEKLQS

SEQ ID NO: 3113 - protein, 813 aa, Zea mays
MDMDGNSPRRPPRRPEREGSYGYDIESMDGSGAGGPPPWSAHHNGSSEALLRYDDGGADRGSTQQPLLRKRTVNTTSQIAIVGANVCPIESLDYEVVENDLFKQDWRSRKKKQIFQYIVLKWSLVLLIGLLTGFVGFFNNLAVENIAGFKLLLTSDLMLKGRYIRAFFVYGGCNLVLAAAAAAICAYIAPAAAGSGIPEVKAYLNGVDAYSILAPSTLFVKIFGSILGVSAGFVLGKEGPMVHTGACIANLLGQGGSRKYHLTCNWLRYFKNDRDRRDLITCGSAAGVAAAFRAPVGGVLFALEEAASWWRSALLWRTFFTTAVVAVVLRGLIEFCRSGKCGLFGQGGLIMFDLSSTVAVYSTPDLIAIIVLGIIGGIFGGLFNYLLDKILRVYSIINERGAPFKILLTITISIITSMCSYGLPWLAACTPCPVDAVEQCPTVGRSGNYKNFQCPPGHYNGLASLFFNTNDDAIRNLFSNGTSTEFQMSSLFIFFTAIYCLGLVTYGIAVPSGLFIPVILAGATYGRIVGTLLGSISDLDPGLFALLGAASFLGGTMRMTVSVCVILLELTNDLPMLPLVMLVLLISKTIADSFNKGVYDQIVVMKGLPYMEAHAEPYMRHLVAGDVVSGPLITFSGVEKVGNIVHALRLTGHNGFPVLDEPPITETPELVGLVTRSHLLVLLNSKNFMKGRVKTSGSFVLRRFGAFDFAKPGSGKGLKIEDLDFTDEEMDMYVDLHPITNTSPYTVVETMSLAKAAILFRELGLRHLLVVPKTPDRPPIVGILTRHDFMPEHIHSLFPNLNPHKYHSASMAG

SEQ ID NO: 3114 - protein, 708 aa, Zea mays
MPPSKPKRRRGGAASRGRKKQKRLDAIRDVPPPPPPPAPLAGGGGSDSEEESIRRSKRVRRAPVVLDTSPLPSPRGKRSRRGVRVGSSGSSRRGSRGRAPHEVDARGVEEGEYDEGSVVWRSRLRDRVKGKAKLGVRARSMWFEDEDYVAEGDGQGEEEEEEEEEDEDEEEDAGMVVVDVRERSEDDEVNKESGCLQLQGKELTDREINLTIDLNLDAHDARDGVDAIEKEEGGKGGNVGKEDVAAEQEQDDEGPTVGTRNDLEEGTGEEMVVEEGLQQEEIGGLESHVSRGNSSDELPCGESNEGVRASNSDRIEQLDMEQTAEESNLPVEQQTEPHLSSPSEQEEEVQQDGQSVHFPDAVLAKDGSKESMQNSWVLDENQGVKVVKEGRRCALCGGGTDGRPPKIALHDSVDSENEAYEGALPSEEPNYDMWDGFGDDPGWLGRLLGPIHDRFGIARVWVHQNCAVWSPEVYFAGLGCLRNVRAALCRGRLLKCSRCGRPGATIGCRVDRCPKTYHLSAKSSLLIVIHRDQSPKSVNQNDQQVNGRKKAGTAGDGCWRVRRAWGRPAWSAPGRRGKKRPIRWPCAPHEGRDVGKTGCHREGICRGRPWVAGGGSGMACVAQVVLVGNWMPRRGGSSPVLGRRRTRHPSLDDIYLNIPQNEGRASRPRRSGRGRRPCEGPSAPLRSDKTRRRPPTTARVGRPRPRRP

SEQ ID NO: 3115 - protein, 274 aa, Zea mays
MSLPAATAPSSSGATQPTEQQGGSRERRVESLGWLTESAVMPKKHKAIEGVGAASILDLKAQLYRTQEEARNPTAPGAAASGGEFRRAKIRSAPTDPLGAKNSGVESRAHKDKLELKAVKDGSASYAALEKKAELYEKLYRGELPDEEDKEKYCVDFFQKSSDRIYEPQMPEISHRATDAAEPVNDHEDSMPNAKPLGLGRAGTTIDRDEHKRFVREVHEEVTEARQKASTVRSRRQEQDAARREKLRQAYLKKRLEKLIAEKQASSASDDLPS

SEQ ID NO: 3116 - protein, 123 aa, Zea mays
MKTRSQTSPKPLKTVAMAPRPSSTKRKPRPKPAGKGDPRAPKKPPTAFFYFMEDFRKIYKQEKPSVKSMQEIGKACGEKWNTMTFEEKVKYYDIATEKRAEFEKAMIEYNKKKVYIILAPPVG

SEQ ID NO: 3117 - protein, 300 aa, Zea mays
MPQAAAPACALPLPTMPRVARSHAWDWVALLLLVAVDVLLNVIEPFHRFVGAGMMADLRYPMKGNTVPVWAVPIIAVIGPVTIFAVVYIRRRNAYDLHHAILGILFAVLITGVLTDAIKDAVGRPRPNFYWRCFPDGEAVYNNITTGVVCHGDPSVIKEGYKSFPSGHTSWSFAGLGFLSWYLAGKMTAFDRRGHVAKLCVVLLPLLVAALVAVSRVDDYWHHWQDVCTGGVLGLVVASVCYLQFFPAPSDEKGFWPHAHLRFVSEMVEEEESRTQRSTETAGARTSHELDALEAGSRRC

SEQ ID NO: 3118 - protein, 216 aa, Zea mays
MAETVGFASGDAAAWRAALAAYDRRLAALDKPDLVAVDSFYRHDLPALLRCRDPDPFLAKPELVRLLQWKLSRGKWRPRLMDFVKGLDDAVVESASRKAFAALPDLRRAITELTVLKGVGPATASAVLAAYAPDVAPFMSDEAMVAALGNSKEYTLKQYLAFADKLQAKAKELSIGEESFTPSDVERALWSSAIASKSPPSGNPKRESKMHGKRKR

SEQ ID NO: 3119 - protein, 172 aa, Zea mays
MGWSTVGHGSSPAPTSPSSLQCSTVRSLVLLHGPRLTVARTAYRLAMLWCEGHPLLPLHIPPLVAHLSLFLGPTAIVLRRMVAAHLVPSHQISSYTSKSRSSACHVLSLVQSVLTRFCWQGFKLLFIVSLMAMPKIKRSHAARVVGAIGEKNKVIYEDVLYYCFHIRDLSTN

SEQ ID NO: 3120 - protein, 91 aa, Zea mays
MTTGQATMKGGIAVVPPLRREIAMRPPKFQGGKVKTPLGHLYDPHKPSIEDGATLDVSRRRRSSAFLPSCRSLLSTLSLSLYVLSDEGDGV

SEQ ID NO: 3121 - protein, 561 aa, Zea mays
MAAALASSPLVHLTTSRLRLPRPQASASSSGPVCSIGVCLGWRLKVGWRALRRRDRLRCFSTDGGGGEEGEKRGEEETSATAAASPASVPAETQVGAGEELASERSRSGSFSSSSSSSGTPGVSSEPPLLSFSVDNIDTVKLLELLGPEKVDPVDVKAIKEKLFGYTTFWLTKEEPFGDLGEGVLFIGNLRGKREEIFAKLQRQVRELTGDKYNLFMVEEPNSEGDDPRGGPRVSFGLLRKEVSEPGPTTLWQYVISLLLFLLTMFSCIELGIASKISSLPPEIVSYFTDPNATGPPPDMQLLLPFVESALPVAYGVLSIQLFHEIGHFLAAFPKNVKLGIPFFIPNFTLGTFGAITQFKSILPDRKTMFDISMAGPVAGAALSFSMFFVGLLLSSNPVGASDLVEVPSQLFQGSLLLGLISRATLGYRAMHAATVSIHPLVIAGWCGLTTSAFNMLPVGCLDGGRALQGAFGKDALFGFGLTTYSLLGLGVLGGPLSLPWGLYVLICQRTPEKPCLNDVSDVGSWRRAALIASVFLVVLTLIPLWDELAEELGVGLVSSF

SEQ ID NO: 3122 - protein, 1041 aa, Zea mays
MDVVQVLASATQLVSAMVSAVGALEQAASDLAEAPRRLQVLEDFVSDLDALTQQSRQRHAHKLHGPQLDRQFQSLGRLMDQLRGNVAKARKVLGSKGKGKGFARLVRSSVVGDPLIKYARLIRDDLNQWLELQELTQSIGNVIASTARSTPSLVRVKSEHGYPVSKKCSYVRELLERDGAHRVVLIVGLSGIGKSCLARQIASDPPLSFVDGAIEIGFGRWCSRAACNGSRSEYHKRLARKICTFLVKIGSMTLKEETGIDLDDVCCLLQTALVGRSMLILLDDVWEQDIVDRFTRLYDNDCRYLVTTRDEAIYEIAEAEKVEICKDDIKEISTEILLYHSLLSAGELPPVAEVLLDRCGHHPLTVAVMGKALRKETRVEKWEKAISNLSTYATCAPGPVSYVNEKDVETTLTIFGSFEFSLEAMPENSRIFFMALAAISWEEPVPEACLESIWSALEQCGLFSLVVSKLVEGSLIIKLEDQPLYHMHDMVSLYLENKTNDATRALLSDSISYNVALVAPWLFVFGKECMKRPAEQKMGSFFSLLEFMDIEILLVNTTQALMACRSLSELETNRIGFSKILGPRIAEIISIGSLDLIFAVTAAITVIFSPSDYINLAHSLEIAGSIDKLIDLLGACEDTSTLANLSSVLTKISEHVDATIADEILSRIPMVRIADLLTAENEQWHEIVFTTLASLTKVGKLKAVETMIESGIDNKLLVLLGNGSEISQHHAIITLKTFCELGAPLQGCIGPAVLLHLPWHARISLERFVLSDRNVPQSPKPQQSFEVILHNILQRDNKNIIKGIQGLLSLAETANDTRVQDLLLGSHLFDRLAWLLQRREVEKNQVRSQTAFLVMKLACTGGEPYVHRFLELNIVHELIDMLQCNIDELQDSAYYALHQIVFAKGGSLVLQRFLQLRTIEKLVNLLDRKSLKTKDLAMQFLVDITEVGTKPCIERMLASQIVEKLVALEKAGDPFGGAVSRYIQGLNMCKKLQSAERAVMKQHILRKVRSAVRGHKLEAILVASVEASIAEGFKGASSSRK

SEQ ID NO: 3123 - protein, 635 aa, Zea mays
MQFWLSGLSKKDCIGRYYAKDATKYRPFSALLPEGGWSGKVLYVKLVLVLLMCGSFMGLLNSPSIHLADERHHHAQTAEAWNASWTSHPDAANSGYASSLRIDWSQVQTAAKQVAPPAGGGATRVALLNFDDGEVQEWKARMPHTDASTVRLDHVGSDVTWDHLYPEWIDEEDHYGAPACPDLPEPKVAKEEEAYDVVAVKLPCGRAASWSKDVARLHLQLAAARLAAARAPRGGGGQAAHVLVVSRCFPTPNLFRCRDEVARHGDVWLYRPDVGDLTRKLELPVGSCKLAMPSKALGEHYASAAPQREAYATILHSEQLYACGAVTAARSIRMAGSGRDMVALVDETISARHRAALEAAGWKVRTIRRIRNPRASRDAYNEWNYSKFWLWTLTEYDRVIFLDADLLVQRPMEPLFAMPEVSATGNHGAYFNSGVMVVEPCNCTFRLLADHVGDIDSYNGGDQGYLNEVFSWWHRLPSHANYMKHFWEGDTEERAAAKRRVLAADPPIALAVHFVGLKPWFCFRDYDCNWNVPALRQFASDEAHARWWKVHDAMPRRLQGFCLLDERQKALLWWDVARAREANFSDAHWSVRIADPRRSICAGGDAEACREREIAGRRVEGNRITTSYAKLIDNF

SEQ ID NO: 3124 - protein, 591 aa, Zea mays
MGSLSMAEKAPGAALPESSCAYLLQELKMIWDEVGQEQSERERILEELEQECQEVYRRKVNSANMSRIQLHQALAESEAEFTNLLLSLGERSFPARPEKMAGTLKEQLNSITPALQEMQMRKDARVKQFVEVQTETHRIASEIAGRLAGGAVAVNEEDLSLKKLEEFQSELRRLKREKSDRLCKVEEYKVLIHNFAKVMGMDPSEILASVHPRLLDGPNEQQTKNISDDILNKLNMTVQQLKQEKSNRREKLQNLVKALTNLWNTLDTHMEERQPYGQIKVLAMTSVNGMLGPGSLTLETIQQVETEVQRLSQLKASKMEELFVKKRAEVDEICKKSHMGMPYQTEMDKIMNLIMSGDVVHDDLLKTMDEYIYRAKEEATSRKDIMDKVDKWMASWDEERWLEEYSRDDRRYSVSRGAHKHLKRAERARIIVNKIPGLVEQLMVKTQFWEQERNKIFYYDELPLLAMLKDYMFTLKEKEEEKYRQRENKKIQTLLVKRHENSIMLRPNTSFSRPSSRGFNTSPGSTSIWSSQVSAKVQLPDSENSPAEKDMRAKIIRNRGTQGILGNNRSCSISHEDKAEVSTVKQGISPI

SEQ ID NO: 3125 - protein, 446 aa, Zea mays
MEYKRSSHVEDEDEDELEEEEEEDEEEEEDEDEEARSHRYTTAAAAPLGTPQQQEVQAQALGLGSHASLMDSAAFSRPLLPPNSSLVTQPPLPPPGFLPAHRQPPQLHPRKAERERERDRAAGAQQPQLRRHQEPVRNNNGVLGGGGGAAPPSAASSTFGLASVRPVVEAPQWRYRECLRNHAARLGAHVLDGCCEFMPSGSDGAAALACAACGCHRSFHRREAIPGGVAAAAAVVSPSAVPVVTPTARASANSSRVMPLLMAPPHMHTRPPHVPASPASAPAALTESSSEELRGHAPAHPAAPPPPPPHAQVVALAGSASAPPAPSKKRFRTKFTAEQKDRMREFAHRVGWRIHKPDADAVDVFCAQVGVSRRVLKVWMHNNKHLAKVPPSPPSSQAQAQAQPPPPPQQHRHHNHHPPPPPPHHIHHHHHPPPPPQQEQQHDMHE

SEQ ID NO: 3126 - protein, 557 aa, Zea mays
MVWSAGMAMRGASAALLVLALVATVARAEDPYHFFEWKVTYGTKTIMGTPQKVILINDMFPGPTINCTSNNNIVINVFNMLDQPLLFTWHGIQQRKNSWQDGMLGTMCPIQPNTNFTYHWQPKDQIGSFFYYPSTGMQRAAGAYGLISVHSRDLIPVPFDTPADDFPVLVGDWYTKDHTVLAKNLDAGKGIGRPAGLVINGKNEKDASNPPMYNVEAGKTYRFRVCNVGIKASFNIRIQNHIMKLVEMEGSHTMQNDYDSLDLHIGQCLSFLVTADQKPGDYLLAVSTRFIKEVNSITAVIRYKGSNAPPPAKVPESPSGWAWSINQCRSFRWNLTASAARPNPQGSYHYGQINITRTIKLAMGRGKVDGKERFGFNGVSHVDPETPVKLAEYFNTTDGVFQYDIIGDVPPSKSAPTKMAPNVIRAEFRTFIEVVFENPEKSIDTIHIDGYAFFAVGMGPGKWTPASRSTYNLLDTVSRHTIQVYPRSWTAVMMTFDNAGMWSIRSNIWERQYLGEQLYVSVISPERSLRDEYNMPETSLRCGKVVGLPMPPSYLSV

SEQ ID NO: 3127 - protein, 169 aa, Zea mays
MQMDKAALLGEVVRHVRELRGEADAAAAGAAVAVPGEGDEVGVEEGHQHRFCHGGERAARRVRAWVCCADRPGLMSELGRAVRSVSARAVRAEIATVGGRTRSVLELDVGGRHHDGEGTSTSSRPALQAALRAVLLSREEMLGAECYKRQRFSAHLARVYDSGAVEVTD

SEQ ID NO: 3128 - protein, 323 aa, Zea mays
MPRTALLRLAAASTTRASSASAAARRLCPSSESDDGGERHAAARKDELLPPPRTPRPDERRLSRRGEHRRELLSVTMASRDHTGLTRQLLDFQHDTIDEVGAEHGPFMDLKARFMDFKQRNYVENFSNYQNLAEQQTPKFMVIACADSRVCPTAVLGFQPGEAFTVRNVANLVPPYEHEGSETSAALEFAINTLEVENVLVVGHSRCGGIQALMSMKDDSTSGSFIKNWVSIGKSARLSTRAAAGNLSFDMQCKHCEKESINSSLLNLLTYPWIEKRVNEGTLNLHGGYYNFVDCTFEKWTLLYREGLEGGSKYAIKNRSTWS

SEQ ID NO: 3129 - protein, 870 aa, Zea mays
MARAPPGGGSPVVALAVPASDVASSGGGLDAKVRLSFGKPRRRLTLAPAPAEHDVPGVVFGFGIPVDELSSAEEDEDGGVGDGSSVAWMGTGARKMAARRPWRGPLPPARVSPHLTLADVLARARTFHGHAGRGHAPGVLLAHASASSPAHASASSPAPSCVSAGGRTNSSFLASRPGIRVLGDRSAGPGRAIVIGVEGRKAHFTFTDGLCGLFGNAGRPRGFSSPARAPPDGVHPLASAFQVAASSPLEPVVVQAKFGAKTKSVVAMDHRGAGGHGRGSDRDVASQGRGGGHGVDPGLFHGGGGGEFPGSNLGFDLGYGGDDRDRGWQRGGFRSRGPRGFAPRRGGFAGRRWHGARAGHHGHQSWDPATAGRGYRPFQAVQAAARPPPAPAPGMDDAAAAAAVTVPALVVGSDAAAGAWNQETVAGDREVHRTGKKEKNCSRCGLKGHLGAECSTKLYCVICDGHDHINHRCHLLKQPRPVALAHAVGYAVSGLGFYHIPHPPLSRKKDSKTALVSVVGSNLSGDQLVAQLQRIVSSKWNWEPVVHEQNSFIVAFPSKNELQRAIAFGGADVRDKDVPMGTRMQFEEWHEEEEGFLLPKVWIRVTGIRKKLREFLNLWAIGSMLGSTQTVDMETTRKNNFGRVLVAVLDPKLLPTKLDAVIGDHYFELRFEVESVGFDENGDEVNQNFGDGNDGDNEDMDEDDPNDSSSLDREGKRSKKDLSGNQNGSDNSMGMGGAAPGGTSAAPVLALEHGVDTEEKIRKMANEIMDMAVDMSLDFCVDKVLAEEDGEYLEGAADGISIDMVAESPTVCPMKVVIAGSLDGVLVDKLPAAFSVVGGVSDDGVCGGGSPFEALLMADTGATMVAADLV

SEQ ID NO: 3130 - protein, 165 aa, Zea mays
MAGEATSPGPCCMCPRQSTHVGATTERRGHVPAPPQPCALAPGSACACRLGATRRGRARPPPRGLRPGTAAKPRKPDPRVAAKRTPRAPIPRAPWTGGRARAWAITGSRARVRRGPHPSRRGRGVAAAPRGAAGTALAERPRTALGAAPSIGPRPRSCLAGAACP

SEQ ID NO: 3131 - protein, 440 aa, Zea mays
MVWDQLKSSSFQVNEEMIETLFICNPANAPAKEATRRPVLPTPRAENKVLDPKKAQNIAILLRALNVTKEEVCDALCEGNTENFGAELLETLLKMAPTKEEEIKLREFEEETSPVKLNPAEKFLKAVLDVPFAFKRVDAMLYIANFDSEVNYLKKSFETLEAACDELRSSRLFLKLLEAVLKTGNRMNVGTNRGDAHAFKLDTLLKLVDVKGTDGHTTLLHFVVQEIIRTEGSRQSASAQTTPRTQANPLREELECKKLGLQAVAGLANELSSVKKAAGMDSDVLSSYVTKLAGGIEKVTEVVLRLKNEGTESRDGAWRFHDRMQRFLKKADDEIIRIQCQESVALSLVKEITEYFHGDSAKEEAHPFRIFMVVRDFLAVLDQVCREVGRVNERTIASSVRHFPVPVNPTTPQLFPRLHALRAGFSDDDDESSAASVSSP

SEQ ID NO: 3132 - protein, 182 aa, Zea mays
MNRKPGDWDCRACQHLNFSRRDICQRCSEPRGVADRGGGGGGGDYASFGGRGGSSFGGGFGAAGSDVRPGDWYCSCGAHNFASRSSCFKCSAYKEEAAVNSGAGGFDGDMSRSRGYGFGSGAAGAGAGAARTTNRPGWKSGDWICTRSGCNEHNFASRMECFRCNAPRDSGSAAMTYENYLH

SEQ ID NO: 3133 - protein, 361 aa, Zea mays
MPPLRRARSILLLLHYVAASHLLLRAAAATLPDPAPLDPALVATPVQPAAAVPGGTIPAFPAQSDSLAGSSSTCPLAPSPALLPAVRASCAAAAALPPRLRCCPALAAWLFAAYAPAALAERPPARPPAAAAAAVDMPLPPDDSEACAGAADRALRAAGATLPRPTGGNNGTCDVAFCYCGVRLRRLTCGPPPAAEGGLWAPADDAAARRLERDCAQPGVPGCSKCLLALTMIKNTSPGGGAAAEAASKEKQAAVRSGESDRDCELMGLMWLLQRNATRYGATATAVIQALMAVDEASAAGVAVAADAGPAAACSLPVDDMPLPAEYAQVGGASDAPRGVCCFFCLLVLFSVLSFRSVYSL

SEQ ID NO: 3134 - protein, 199 aa, Zea mays
MPPKTRIFCDILASRAAFFRWAGHRHLGHEHSPYSWNLFVDILGKNRLFEPMWDTVKSMHSQQLLSLATFASVFSSLAATPGGSPLKAFMDMPRYGMTRDTAALNSLLSALCRANRFDDARAAIPVAALRLARARMPTPTPSSSRAASLPPTCGLRARCSTKWCAPLALILTTCLPMTPSSLRWFQATPPRRHQKQWGT

SEQ ID NO: 3135 - protein, 236 aa, Zea mays
MVTDKSNLPQQQQPPPPSASSAPSSLKSLNKASYKISKQSSSASPAPVPASTMRAPSPPPPAPRPPPPLPPPPPPPPQASSIPADHPPPQPPVYNIDKSDFRDVVQKLTGSPSHLLPPQPAPTPATARARAPLMAPPPPIMAPPPPPPTAIPSRLHRIRPPPLAPPPILPPAPPALSPLPPLPAVCMTAESPISAYMRRLRGMPSPIRAPTSPLGFGCLPSPGVPMPATSPRVRDP

SEQ ID NO: 3136 - protein, 633 aa, Zea mays
MGKRPRTTLRRTPARGLPKSKRADELPSMPDSDNDEIDAFHKQRDMIPFDANDVRESEDDDVEQPVFDLKGVSDSESDDSKGELSGDMAEADYEGWDKGYISKLKRAQRAVKQIAGGDDSMDEQEDETQENVWGRGKNAYYAPGEQSGDDEVDYEEAQRIQKNKEKRLSMKDFGLEDGESDEEGNATKVSNHESKMKEDFAVLSGDEKMDVLYSSAPELVSLLSELKDAHEELRAIGQLTSEVTSCLGKDKMQPFEVKKACLLAHCQAITFYLLMKSEGLSVQDHPVISRLIETKNMVEKIKQITLNPVSQKGCADDHSMHCGTIQTDKIVSLDKQEGKFSNVLALDKVKQGAEVSESRKSEPCNNDYHEVNEQKNKDERMGLHSLEMLKVRANLEERLKKKGLYNLTRSKPEKSSKTRTTSDKSGLQTLDDFDDEVLKNNQMMKPSKLVAAAAKSNKSMFVSGDDDLPKRDNIGERRRKHELRVLSRVGANSAEDHELPDGDASEEEDHHELPEGGDESEDDIHRDVKRKRTEKLSTKNALYSPTPGVEHLEEETEGDGKRTISYQILKNRGLTRSRNKKKKNPRKNYRDKHKNKLVKRKGQVRDIKKQSGPYGGETSGINPNVSRSVRFKS

SEQ ID NO: 3137 - protein, 88 aa, Zea mays
MQEGDVNRSYCENETIDAAIPDDDEILDERVMLHDPDKPCMDIGTMYPSMRDFRLAMRQFAVNEEFELEIYKTDPSRFIGNCKGEGCP

SEQ ID NO: 3138 - protein, 152 aa, Zea mays
MPLGLTLGSLGRAMRQKRPSSLDILSSKRAPRDYYKGKNCKPTGFHTRKGGYVVVDEKLPRFAVPDNDSFQGNWPLFFWSTLHTFTTSEFRQHHNLLRWLRTRLRSSPRHEPDAMCGRLQLKPFVSQCTRDLAASTTSSASLTSAQTTESRS

SEQ ID NO: 3139 - protein, 135 aa, Zea mays
MVATGCAPPGPGSLLRSPQVAAVEFPARFSARRPACPRCRTRSLWRAQAPAPLRALLPCARELACDAPAPAPARSLLQPLLAMDLPARALLCSCALPIFHGARPRKAFIGHGASSSLSLLPCSSVMISIGRSVFV

SEQ ID NO: 3140 - protein, 767 aa, Zea mays
MSGGAPLLALLLLAAAAMIAPSPANAAVSYDHRAVVINGQRRILISGSIHYPRSTPEMWPGLLQKAKDGGLDVVQTYVFWNGHEPVRGQYYFGDRYDLVRFVKLAKQAGLYVHLRIGPYVCAEWNFGGFPVWLKYVPGISFRTDNGPFKAAMQAFVEKIVSMMKSEGLFEWQGGPIILAQVENEYGPMESVMGAGAKPYANWAAKMAVATGAGVPWVMCKQDDAPDPVINTCNGFYCDYFSPNSNSKPTMWTEAWTGWFTAFGGAVPHRPVEDMAFAVARFIQKGGSFVNYYMYHGGTNFDRTSGGPFIATSYDYDAPIDEYGLLRQPKWGHLRDLHKAIKQAEPALVSGDPTIQSLGNYEKAYVFKSSGGACAAFLSNYHTSAAARVVFNGRRYDLPAWSISVLPDCKAAVFNTATVSEPSAPARMSPAGGFSWQSYSEATNSLDGRAFTKDGLVEQLSMTWDKSDYLWYTTYVNINSNEQFLKSGQWPQLTIYSAGHSLQVFVNGQSYGAVYGGYDSPKLTYSGYVKMWQGSNKISILSAAVGLPNQGTHYETWNVGVLGPVTLSGLNEGKRDLSDQKWTYQIGLHGESLGVQSVAGSSSVEWGSAAGKQPLTWHKVSVLLRCHPPQVFHCLKPSTPVDCDRSPGLLQRAVRRRAGGPGHGQHGQGPGVGERPPHRAVLVVQGLLQRLRRLQLRGDVQRDQVPDRLRRRLPEVLPRPALLAQPQRQPAGDARGVRRRPVRREAGDQDGVTRNGEGRACRTHTGCE

SEQ ID NO: 3141 - protein, 557 aa, Zea mays
MCTTPVPSPLPVALVGVKGDHRVYVTVPQHPEGDVAVHRSRQFMCRAVPLPTAGETFREAVALCRLAFPIALTALLLYSRMALSMLFLGTIGDLPLAAGSLAIAFANITGYSVLSGLSLGMDPLCSQAFGANHPRLLGLTLYRSVLFLFCCSLPLTALWLNMSRILVFLGQDIEITALAQEYILFSLPDLFSFSLIHPLRVYLRSQGITWPLAAAAGAAVLFHAPTNYVLVGRLRLGAPGVAAAASASNFVLLGVLLACVVGRRDSGLRAAGPPTAECLAGWGPLARLAAPSCVSVCLEWWWYEVMILLCGLLPDPKPAVASMGVLLQTTALVYVFPSSLGFGVSTRVGNELGANRPGHARAAAHVAVAGAACMGLAAMSFAAGVRHTWGRMFTADPDILRLTAAALPVVGLCELGNCPQTVGCGVLRGSARPTRAAHVNLGAFYLVGMPVAVLLAFGLGVGFVGLWIGLLAAQVCCAGLMLFVVGSTDWEAQARRAQELTSCAVGEMEKTGAHASATTEAGGRPEKGEQEEGVERRHDDYEPLMISNSGEPEPETV

SEQ ID NO: 3142 - protein, 86 aa, Zea mays
MERFIIKEPQVSSPNNQAIDQDTAQDTETANGHNDSEIERENIVSNDDELETENIVDEQGPDNIDDTSMAVNLDSSHAANIDDSSF

SEQ ID NO: 3143 - protein, 111 aa, Zea mays
MVVVGPCVLPRSSHLPSTPLFFFSFGVHRVLLLPFVCSGDRPPRRPALPLSLRVLSPQHQSDAPSIHMLWWSSTPASSAALVSSGFVSPTSVAASTHVRGCRIYDSDTPYT

SEQ ID NO: 3144 - protein, 44 aa, Zea mays
MRQSVRIIVQCPNRMPSGMIKADDRKLCPPSRSRMKLSMESCAV

SEQ ID NO: 3145 - protein, 684 aa, Zea mays
MDAVEVKDFRPISLIHSFAKLVAKLMATRLAPLLPSLVSVNQSAFVRGRRIHDNFMLVQQIVKLLHKKKEPHILLKLDISKAFDSVSWSFLLEVLRKMGFGQRWRDLLCLLLSTSSTQILVNGEPGDIIIHRRGLRQGDPLSPMLFILVMDTLNSLINYATSLGLLQPIAVQQVRHHVSFYADDVVVFLRPHILDLVSVRRILDLFGHASGLRTNLVKSSVSPIHCSDDELALSVETLSCSVKVFPCTYLGLPLTTCKPSKEVLLAFVDKVADYLPGWKASLLNRAGRLVLVKVVLTAVPIYWLIALDLPKWFIKAVDKKRRGFLWKGHQQANGGNCLVAWDKVQRPLQYGGLGIHNLELLGWALRIRWLWAQKTDVERPWAGLSISIPYKARALFDMAVNAVVGNGEKIIFWTDRWLDGLTMAEMAPNLFRTDPMRIAKRKTVAQALFGRSWVRDIKGALTVQVLIEYLQVWDFVEEVVLQADVPDHFRWKLTQDGCYSSKSAYEAFFVGSTKFGPWKRIWKTWAPSRCKFFLWLVHHNRVWTADRLERRNLPHPVSCPFCDQMTETVHHLLVGCVFARQIWALILQQLGLLQLAPQPSVSRFSGWWKRTVAAVPKGLRRGLNSLITLVAWEIWKHRNRCVFDNSRPCVVEVLKAVNVEGGLWCLAGASKLQELVFGSVPTGA

SEQ ID NO: 3146 - protein, 55 aa, Zea mays
MHTKSASMLLASSSSCASESHTLTCFTSTVTANSAAARSSATFLLLSLSCLVNLN

SEQ ID NO: 3147 - protein, 196 aa, Zea mays
MGGGVSADPGRREPSARGQRNQSRGIFQGVVNEDDRSGHTCSGTAMEPIPCEGQSRGDAKLRLSIPTTPSHAPTCVTRTGGATAPPTRSLTTARSQRPSSSLSLFTGFRGRLREDEWVTGVPDQGYNLGRKKGGIRQPIGSSSREDYAREAPTMRIRHRRRQTRSPLREQQDDNRGPPVGVRSHGSREQPASELVN

SEQ ID NO: 3148 - protein, 481 aa, Zea mays
MRLRLRQEVRLRVEMRLRQLQQGVHLYSSNVSMFDACPSFCREWLDYSFTGQGRQKQVNSVLSSLLKFHYPGLVKTSDDADAAPVLVSCWDDYKLKVDVTYGDAQGLVRADFWARFRLADGDDANHAEKVFQVNAYRLVKEALYEARIQATCMYYQQILGQKMNKKTGASSIYLREEEYRKVVVPWMSNRPEAYAAWCGVWASEAFQQKSKSHRDNRGTMPNHTFGGDNFTRKAKRLEAQLGREPTPIEVWEAGHRGSDPSNPLCSQTQRERLAAYAEEMKDRHGEDCDWRTMPIDAQAVHKSGGGKAHGRFSLFDGMINTTDFRASRRSASGSGSSGRSSRRLTEQELEIVRLREENRERDEQLRAQTEQLRAQSEYYASVHAQQQQMIQLLAQQQGIPYVAPPPPPQWTFVPMGPPPPPGLVPQQPQFSTPPAQLPAPGAQDNQEGSGTMDGFVNSLFVYPTPDGGSGQSSNNPSRRGS

SEQ ID NO: 3149 - protein, 163 aa, Zea mays
MATDAILETIKPRGSEEQLPVTTAGTGIELRRRISSFSARVRPSSSVAAFRRARSMPSVKALAAAGALRRWWEWGLGWVTAPFATRALELGGGDDDDDDDDEARPLGLGGCRCAGGWRHTLFRLRAGARRLLGRDGRPLKAPAPQDFGYDSVSYKQNFDDGEA

SEQ ID NO: 3150 - protein, 143 aa, Zea mays
MGVTYQRLLSQGSQSQRPRGGGVRARAWVLLRWAAVRLSCAARRRYWCGGAGRARKLAWAGLCGRGGTAAERKGGSGRRSATAGGGAGAGAGAGVLGYDSASYARNFDDGAWKAEEGVSWAGPGGAFFPGANIGGAAVDTARL

SEQ ID NO: 3151 - protein, 750 aa, Zea mays
MAGVPSSLARLYFLLLPLATGCLLLLSAEAARLPLSLAPADAAADALLRLKAGINDSGGALGSWSPDTSPCGDGDGGGASWKGVMCNRDGVHGLQLEGMGLSGVLDLRALTSLPGPGLRTLSFMDNDFAGPLPDVKALSGLRALFLSGNKFSGVIPADAFAGMGSLKKVVLSNNDFTGPIPASLADAPRLLELQLNGNKFQGKIPDLKQDELTAVNLANNELEGEIPPSLKFTPPDMFAGNTKLCGPPLGVKCEAPPPPSASPSPSPPPSPKTPPPASVKEGTTPSQPAADTVASTGASSADDAKQDEGHKPVEGSTSTSFGVLAAFIGTLGIAGVAFVALRRRRGYKTKNFGPTASSARPSDPPRVEPHPPAAKAEASAAQAPPAAAGCVARAGGAARKVEQGRLTFVRDDRGRFFELQDLLKATAEVLGTANLGVCYCATLTTGHSVVVKRFKEMNRVGKEDFEEHMRRLGRLSHPNLLPLVAYYYRKEEKLLIHDYVPNRSLANLLHGGGDERGMKKAALHWAARLKIVKGVARALSYLYDELCMLTVPHGHLKSSNILLDGHYEPLLTDYALVPVMNQSHAAQLMVAFKSPERKQFGRSSKKSDVWCLGLLILEMLTGKPPTYDLPKAAGAVPSAESLSSPQKPGPAAGNGTDLVTVVGSTPEGEWLDTVVDPDLRGEEEEDKEEMVKLIRVGMACCESNVDSRWELKTAIDKIEELKAKERPAPDEEQAFYSTVNNEDFNDVAIN

SEQ ID NO: 3152 - protein, 131 aa, Zea mays
MAGIGPIRQDWEPVVVRKKAPTAAAKKDEKAVNAARRSGAEIETMKKFNAGMNKAASSGTSLNTKRLDDDTENLAREQSSVSGHFSHEQSDRRFFVPRIPIDKFGHLSTVDVINDLYMFMFTSLAVDDVFF

SEQ ID NO: 3153 - protein, 228 aa, Zea mays
MAMDSSSSGSEPTSSSSAEAPASPTASSSESSAAGSKKRRRSKDGHHPTYRGVRMRAWGKWVSEIREPRKKSRIWLGTFATAEMAARAHDVAALAIKGRAAHLNFPELANDLPRPATAAPKDVQAAAALAAAADFQAPANAAAATDPDDGPAAAADSASASPPPPPPQLDNPDDALFDLPDLLLDLRHGASSCQLSCAPSWYDDACFSGAGAGAGALFRLEEPLLWEY

SEQ ID NO: 3154 - protein, 837 aa, Zea mays
MAEEDRQRRWRRRRFANLRSVRWRIDLGILPASPGASVDELRRAAADSRRRYVSLRRRLMVDPHLPKEEDRSSNLVVDNPLSQNPDSSWGRFFRGAELEKTVDQDLSRLYPEDGSYFQTPSCQAMLRRILLMWCLQHPECGYRQGMHELLAPLVYVLQVDIDKLSQVRKLHEDCFNDDFDGVAFPDTDMLFSYKPRKDSNWHSRADNGDDSESASRVNTLDELDLDTKEIISLSDAYGAEGELGIVLSERFMEHDAYSMFDGLMDGGSGVVCMAEFFSTSKVGSSSSLAPVIEASASLFHLLSIVEPSLHSHFIELDVEPQYFALRWLRVLFGREFCLDDLLVVWDEVFACSNDMLLRENEECNFKILCSSRGAFIAAMAVSMILHLRSSLLATEINTLCLQRLLNFPNNVDVHKLIEKAKSLQSTAIDANTLSPSLLSKKDSCDYDRVYSNLATSTPPRTPLHPLAESYWEEQWRNLHNDGTALKESDNKGLSYKRSLKQSLSQRLGLSRTESDPSPVKVVSVNNDARNSVRRCLLNSYSDKVVQSNEVIGKFEQDKFPIVSIHKETILSSERSSQLKLKAASENLTVSPPPSVAKFNPLIDSPVKPADESSAKRTEDCSSGENSPVFYTARAGNEHENCHDNDSEKSSITSNSCAGDDYRDEVLPDESSSCNCEDKTVSEAIESGANVGQTRPLEKTMVPNERKPFINKLQWLLRFGRPSAEGNVVEKGSGQASSDGKHDAVPPCPSPADASSDNSCSGINLAYGDNKKVMGTLKNIGQNMLENIQVIETAFQQDRAQPSAMENLSNNILGGKGQVTAMAALTELRKISNLLREM

SEQ ID NO: 3155 - protein, 373 aa, Zea mays
MSDGKDSLDLSALGAAIPNSAELSAEDKANLVASIKNTLEGLASRHTDVLESLEPKVRKRVEKLREIQGEHDELEAKFFEERAALEAKYQKLYEPLYSKRYEIVNGVVEVEGITVESAAETPAEQKTGDETSADQKEEKGVPAFWLNAMKNHEILAEEIQERDEEALKYLKNITWYRISEPKGFKLEFQFGTNPFFKNSVLTKTYHMIDEDEPILEKAIGTEIEWYPGKCLTQKVLKKKPRKGSKNTKPITKTEDCESFFNFFSPPQVPDDDEEIDEDIAEQLQNEMEQDYDIGSTIRDKIIPHAVSWFTGEAAQDEEFEVMDGEDDDDEDNDDEDEDDEDDDDDDDYDSKKTKGTAGGEGQQGERPAECKQQ

SEQ ID NO: 3156 - protein, 393 aa, Zea mays
MACLTDLVNLNLSDTTEKIIAEYIWIGGSGMDLRSKARTLPGPVTDPSKLPKWNYDGSSTGQAPGEDSEVILYPQAIFKDPFRRGNNILVMCDCYTPAGEPIPTNKRYSAAKIFSSLEVAAEEPWYGIEQEYTLLQKDTNWPLGWPIGGFPGPQGPYYCGIGAEKSFGRDIVDAHYKACLYAGINISGINGEVMPGQWEFQVGPSVGISSGDQVWVARYILEVRRHVFLWARTFVGRRRLVLSCPSMCDLCAAFFFCLQRITEIAGVVVTFDPKPIPGDWNGAGAHTNYSTESMRKEGGYEVIKAAIEKLKLRHKEHIAAYGEGNERRLTGRHETADINTFSWGVANRGASVRVGRETEQNGKGYFEDRRPASNMDPYVVTSMIAETTIVWKP

SEQ ID NO: 3157 - protein, 248 aa, Zea mays
MALAPTSAAVLKTPFLGARRALANAAAKPAPRRALVVAAAAAAKKSWIPAIKSDAEIVNPPWLDGSLPGDFGFDPLGLGKDPAFLKWYREAELIHGRWAMAAVLGIFVGQAWSGIPWFEAGADPSAIAPFSFGSLLGTQLLLMGWVESKRWVDFFNPDSQAVEWATPWSRTAENFANFTGEQGYPGGKFFDPLGLAGTVKDGVYIPDVDKLERLKLAEIKHARIAMLAMLAFYFEAGQGKTPLGALGL

SEQ ID NO: 3158 - protein, 943 aa, Zea mays
MAGHHRARRVNGTRAPPRRPSAEKITRSRSHPEKPRTSPTTVLRVQPLLCACVWLALLLACLPRQAAAQDAEARLLLQIKSAWGDPAPLASWSNATAAAPLAQCSWAYVLCDGAGRVSSLNLTNVTLAGRTIPDAIGGLTALTVLDLSNTSVGGGFPASLYNCAAIARLDLSHNQLAGDLPADIDRLGANLTYLALDHNNFTGAIPAAVSRLTNLTYLALGGSQLTGTIPPELGQLVNLRTLKLERTPFSAGTLPESFKNLTKLTTVWLAKCNLTGEIPSYVAELAEMEWLDLSMNGLTGNIPSGIWNLQKLTNLYLYTNNLSGDIVINNGTIGAAGLVEVDLSENMLTGTIPGSFGSLTKLRLLILHDNNLVGEIPASIAQLPSLVYLWLWSNSLSGELPPGLGKETPVLRDIQIDDNNFSGPIPAGICEHNQLWVLTAPGNRLNGSIPTGLANCSSLIWLFLGGNQLSGEVPAALWTVPKLLTVSLENNGRLGGSLPEKLYWNLSRLSIDNNQFTGPIPASATNLKRFHASNNLFSGDIPPGFTAAMPLLQELDLSANQLSGAIPQSIASLSGMSQMNLSHNQLTGGIPAGLGSMPELTLLDLSSNQLSGAIPPALGTLRVNQLNLSSNQLTGEVPDALARTYDQSFMGNPGLCTAPPVSGMRSCAAPSTDHVSPRLRAGLLAAGAALVVLIAALAVFVVRDIRRRKRRLALAEEPWKLTAFQPVDFGEASVLRGLADENLIGKGGSGRVYRVTYTSRSSGEAAGTVAVKRIWAGGSLDKKLEREFASEVDILGHIRHSNIVKLLCCLSRAETKLLVYEFMGNGSLDQWLHGHSRLAGTGTAMVRAPSVRREPLDWPTRVKVAVGAARGLYYMHHECSPPIVHRDVKSSNILLDSELNAKVADFGLARMLVQAGTTDTMTAVAGSFGYMAPGTCLVFLPGS

SEQ ID NO: 3159 - protein, 901 aa, Zea mays
MKIAFLMSLVLSLFLLPNGICKSLVARPSVVNIGSILRLNSTIGGVSDVAIRAAVEDINSDPTVLNGTTLHVETRDTNCNDGFLGMVQALQFMETDVIAIIGPQCSAIAHIISYVANELQVPLMSFASDATLSSIQFPFFVRTMPSDLYQMAAVAAVVDYYQWKIVTAIYVDDDYGRNGIAALDDELTARRCKISYKTGFRSNAKKSELLSLLVTVSNMESRVIILHTGSEPGLKLLSLANGLNMMGNGYVWIATDWLSAYLDANSSVSAETVNGMQGVLTVRPHTPKSNMKRNLVSKWSSLSKKYNHSDLRTSAYGFYVYDSVWTVARALDAFFDDGGRISFTNDSRLRDVTGGTLHLEAMSVFDMGNKLLDKIRNVNFAGVSGQVQFNAQFELIHPAYDIISIIGNGMRTIGFWSNYTRLLSTTPPEDLYSKPPNTSLANQQLYDVIWPGETAQKPRGWAFPYNAKELKIGVPNRFSFKEFVSKDNGTGSMKGYCIDVFTQALTLLPYPVTYRFIPFGNGTENPHFDQLAQMVADNDFDAAIGDIEITMSRTKIVDFTQPFIESGLVILAPIKKHITNSWAFLQPFTLGMWCVTGLSFLVVGVVIWILEHRINDDFRGSPWQQLITIVWFSFSTLFFAHREKTMSTLGRGVLIIWLFVVLIIQSSYTASLTSILTVQQLDTSIRGLDDLKHSDYPIGFQVGSFVKEYMIKELNISQSRLKALGSPEEYAENLKLGPKKGGVMAIVDERPYVELFLSTYCKIAVAGQDFTSGGWGFAFPRDSPLQVDLSTAILTLSEDGELQRIHDKWLKTGDCSSDNTEFVDSNQLRLESFMGLFLICGAACVLALLIYFGITLRQYLRHEQPGSAISADSGSSTSKRSLRKFISFVDERQRSPKKNGP

SEQ ID NO: 3160 - protein, 137 aa, Zea mays
MYEDTRSDRRHYGLRQPTDGAQHRAGLRARSDQREVPAPASPTDKQHDKAQLQSQDGTKTVPLDQATPKQTVTISEDLTSHEEEKLLCCLSKNKDVFAWSALDLVGVSRSIIEHSLGIDPSVRPKKQRLRKMSDEKT

SEQ ID NO: 3161 - protein, 591 aa, Zea mays
MDGKKVQERAAWCVSDGGGNLVQDAVDYRGCRADKSSTGGWASAALAVGIELCERLSTMGIAVNLVTYLTATMHLPSAAAANVVTDFMGTSFLLCLLGGFLADSFLGRYLTIAIFAVVQAIGTGLLAVSTEVRQLRPPPCGPGAAGPCEQATGLQMGVLYVCLYLIALGTGGLKSSVSGFGTDQFDERDARERAAMGLFFDRFFFFVTFGTLLAVTVLVYVQDHVGRSCAYGICAGAMLVAVAVFLSGTRRYRYKRSSGSPIVHILQVLVAATRKRNIVMQPLTAAALYEDHPEHARIPHTAQFPCLDRAAVMAGDDDNEVGHDGRPTMNPWKLRSVSRVEEVKMVARLMPVWATTILFWTMYAQMITFSVEQATTMDRRMGGFEIPAASLTVFFVGAIMLTLAFYDRVFVPLCRSLMTGRQGFTNLEKIGIGLVLSTFGMAAAAICEKKRLAVAATSVAVGHGSLPISVFMLTPQFLLVGSGEAFIYTGQLDFFIMRSPKSMKTMSTGLFLTTLSLGFFLSSALVSLVKSCTRWLGDTINHSRLDYFYWLLAVLGVVNLVAYIVYAMWAAAPASSQAEQPQHAMAADEKC

SEQ ID NO: 3162 - protein, 1084 aa, Zea mays
MAGHHRARRVNGTRAPPRRPSAEKITRSRSHPEKPRTSPTTVLRVQPLLCACVWLALLLACLPRQAAAQDAEARLLLQIKSAWGDPAPLASWSNATAAAPLAQCSWAYVLCDGAGRVSSLNLTNVTLAGRTIPDAIGGLTALTVLDLSNTSVGGGFPASLYNCAAIARLDLSHNQLAGDLPADIDRLGANLTYLALDHNNFTGAIPAAVSRLTNLTYLALGGSQLTGTIPPELGQLVNLRTLKLERTPFSAGTLPESFKNLTKLTTVWLAKCNLTGEIPSYVAELAEMEWLDLSMNGLTGNIPSGIWNLQKLTNLYLYTNNLSGDIVINNGTIGAAGLVEVDLSENMLTGTIPGSFGSLTKLRLLILHDNNLVGEIPASIAQLPSLVYLWLWSNSLSGELPPGLGKETPVLRDIQIDDNNFSGPIPAGICEHNQLWVLTAPGNRLNGSIPTGLANCSSLIWLFLGGNQLSGEVPAALWTVPKLLTVSLENNGRLGGSLPEKLYWNLSRLSIDNNQFTGPIPASATNLKRFHASNNLFSGDIPPGFTAAMPLLQELDLSANQLSGAIPQSIASLSGMSQMNLSHNQLTGGIPAGLGSMPELTLLDLSSNQLSGAIPPALGTLRVNQLNLSSNQLTGEVPDALARTYDQSFMGNPGLCTAPPVSGMRSCAAPSTDHVSPRLRAGLLAAGAALVVLIAALAVFVVRDIRRRKRRLALAEEPWKLTAFQPVDFGEASVLRGLADENLIGKGGSGRVYRVTYTSRSSGEAAGTVAVKRIWAGGSLDKKLEREFASEVDILGHIRHSNIVKLLCCLSRAETKLLVYEFMGNGSLDQWLHGHSRLAGTGTAMVRAPSVRREPLDWPTRVKVAVGAARGLYYMHHECSPPIVHRDVKSSNILLDSELNAKVADFGLARMLVQAGTTDTMTAVAGSFGYMAPESVYTRKVNEKVDVYSFGVVLLELTTGRLANDGGEHGSLADWAWRHLQSGKSIAEAADKSIADAGYGDQVEAVFKLGIICTGRQPSSRPTMKGVLQILQRCEQAHQRTFDEKVADYDAAPLLQVHGGSRRKQLSDAEVIDDDGKGGFDCNV

SEQ ID NO: 3163 - protein, 410 aa, Zea mays
MFSIFFGTLFANTVLVYIQDNVGWAVGYALPTLGLAVSIAIFTAGTPFYRHKPPTSESPFAKMARVIVACARKLPVAVPVDPRDLHELDDGYYAKKNAAPLPHTPHLNVLSKAAVKTTGGGGAPASRWSLSTVTQVEETKRMLKMLPVLAITFVPSAMVAQVNTLFVKQGTTLDRHIGRHFEIPPASLQGFVTISMLFSVVLYDRVFMPLARRVTGDPRGISLLQRMSVGLVIHIVIMATASVTERHRLAVAHEHGLYDSKGTTIPLTIFVLLPQFVLMGVADAFLEVAKIEFFYDQAPEGMKSLGTSYSMTSLGIGNFLSSALLSAVSHITERHGRTGWILNNLNASRLDKYYAFFAILNCANLIAFFFVCRFYVYNAEVSRVVDTGSSKQKREVAMQPAAVGAVEATL

SEQ ID NO: 3164 - protein, 372 aa, Zea mays
MYNFKVKPCSRAYSHDWTECPFVHPGENARRRDPRRYSYSCVPCPEFRKGGACRKGDGCEYAHGVFECWLHPAQYRTRLCKDEVGCARRICFFAHKREELRAVNPSAVSVGMQMQPTVSPPPPSGLGDMLSPAAWPSSPASRLNKAALGGGRDLDLDQYQHMLFDTVSSPRANWGSAGGIGSPLPPARAVPDYADLLGSVDAASMLSQLHALSLKQAGGDMPAYGSMVADTQPHMATTSPMVGLGSSTAFGLDHSMAKAILSSRASAFAKRSQSFVDRGGRAPAARSLMSQQAAAAGAPPVLSDWASPDGRLDWGVQGDELHKFRKSASFAFRARSPPPPAEPDVSWVSSLVKDGHAGDIFAQWPELEQMVA

SEQ ID NO: 3165 - protein, 347 aa, Zea mays
MERRGHCHGGKPPHPHPPPRRVRTRQPSSGSFSASLLDAIYRSLDDGDGADVVVDAARGSVEEKAAATATAQFWWLNKAAAPKPCRQSSSTADRDRRRREAGVARPRHSGSGYASSTASSSDSSAASYSSLSCSSASTVGIESTCRRHGLPPPRVSLSEESVATDAEETTPPPPNSKPKKKARPCFPVARIRPRASVPPPSSGPQPPSSPATFACALKALFSSARLQRKPKAPAPARTTPPPKISHPPRMSTTSAAKAADAPQPSEPTTVRLHPEAEASVVRRRVEELVRGLEELEEDEERSDASSDLFELESLRGAGADELPVYGTTSLVANRAIAQGPGGQLVNK

SEQ ID NO: 3166 - protein, 216 aa, Zea mays
MAASSLCHGHLLLFLLVSVTSACLGTAAAHQAGSGEGYTIAGRVKIDGMSEKGYGLPAKTSNTKVILNGGQRVTFARPDGYFALYPTNDSLPHNVPAGTHLIEVSSIGYFFSPVRVDISARNPGYIQAALTETRRVLNELVLEPLKEEQYYEVREPFSIMSLLKSPMGLMVGFMVLMVFVMPKMMENIDPEEMKQAQEQMRNNPVSFSGLLARAQG

SEQ ID NO: 3167 - protein, 129 aa, Zea mays
MAKYNVVQKNKRQCNQDRKRAAHGEPGTGKLKQRTAPVSMSGKRKKKLERRLNRKQKEAAMIKALENNMGDVDMVSVEESSEAAKGKSQVKFSVKKNSRIQIKRLKGKGTTVLKLIVIHQLKHHFPSWK

SEQ ID NO: 3168 - protein, 594 aa, Zea mays
MASDAPAPAAAQPKRRGSYNCGRCGLPKKGHVCTVPRLAAAGGGDKAGEQQPPPPPPQTKPRRALQFDDPPAASDVLLDAVPLAAAAPGKKARVEAVDVEEEEDGGGDYDPPPLDWWVEAGAGRRAPGEVLVEVLRRMPPRAVAAAAGVSRGWRECARRVWRAAEEVRLRAAGVGPVGALMARCPALARLVLRMDSDVDATMLACIAFSCPNLQSLDISMANSAVNRITGDELSRFVSEKRSLSVLKLDGCSSLGFLNISSSSLSTLWMSGLCSLTKAVMNCPNLTELSLDFPKQNNDSTDLAALIDSLGRTCPNLRNMHVSSIRLCNEAVFALESANLRGLCMLSLVLGSKITDAAVASIVRSYSSLELLDLSGSGITDNGLGMISKAFPDTLTRLLLALCPNITSSGVQVAAAQLPLLRLMDCGNSICANPQPEAGRSYFGDLTGGIKFCSKLPVQKKQQQQQAACQKLIIKHGALKKLSLWGCSAIDALYVNCPELVDLNLNACTNLHPERLLIQCPKLKDVHVSGCRDMLIGAVRNQVLNEFAAAEPRLPCKRLADGSKRVHVPHFMIEQLEEQEKWGGPRKSQCTVHLT

SEQ ID NO: 3169 - protein, 905 aa, Zea mays
MMNLNLKQPLVLPAHHSNVVGSRLSSSSPSAAAASRRTGGGVSSRSGSRRHVRLPRISCSATEEVSGAVSSVTVERMLTVTASVEASPAIGQMYFQRAVDDIGDLLGKTLLLELVSSELDAKSGVEKTRVTAYAHKTLREGHYEAEFKVPASFGPVGAVLVENEHHKEVFIKEIKLVTGGDSSTAVTFDCNSWVHSKFDNPEKRIFFTLKSYLPSDTPKGLEDLRKKDLQALRGDGHGERKVFERVYDYDVYNDLGDPDKNPAHQRPVLGGNKQYPYPRRCRTGRPRTKKDPETEMREGHNYVPRDEQFSEVKQLTFGATTLRSGLHALLPALRPLLINKKDLRFPHFPAIDDLFSDGIPLPAQTGFDAIRTVVPRMVKLVEDTTDHVLRFEVPEMIERDRFSWFKDEEFARQTIAGLNPLCIQLLTEFPIKSKLDPEVYGPAESAITKEILEKQMNGALTVEQALAAKRLFILDYHDVFLPYVHKVRELQDATLYASRTIFFLTDLGTLMPLAIELTRPKSPTRPQWKRAFTHGPDATDAWLWKLAKAHVLTHDTGYHQLVSHWLRTHCCVEPYIIAANRQLSRLHPVYRLLHPHFRYTMEINALAREALINADGIIEESFWPGKYAVELSSVAYGATWQFDTEALPNDLIKRGLAVRGEDGELELTIKDYPYAHDGLLVWDSIRQWASEYVNVYYKSDEAVAADPELRAFWDEVRNVGHGDKKDEPWWPVLDTRDSLVETLTTIMWVTSGHHSAVNFGQYHFAGYFPNRPTTIRKNMPVEEGGPGEEMEKFLKQPETTLLDMLPTQMQAIKVMTTLDILSSHSPDEEYMGEFAEPSWLAEPMVKAAFEKFGGRMKEIEGFIDECNNNLDLKNRCGAGIVPYELLKPFSKPGVTGRGIPSSISI

SEQ ID NO: 3170 - protein, 135 aa, Zea mays
MEKKMPWISGLTKGTNHVGAALVDRQEQSAGCLFARGSRGPDAWAHGRAAARLPAAYRVALGKLCWLPCTLAAALAGCRAGCAELARTRAETPRPGTSSLATPRRRPRKTEGARRGGSHGLKTPCRMGHGHGTAA

SEQ ID NO: 3171 - protein, 468 aa, Zea mays
MEVEAAGPDKLAPPSPVEGPGENGAATKVQKVYRSYRTRRKLADSAVVVEELWWQALDYARLEHSTVSFFDEPKPETAASRWNRVSLNASKVGQGLSRDGKALKLAFQHWIEAIDPRHRYGHNLHFYYDEWCKSQAGQPFFYWLDIGEGKDLDLPECPRALLKQQCIRYLGPQEREHYEYIISEGKVIHKQSGEPLDTRRPKGTKWIFVMSTAKKLYAGKKQRGVFQHSSFLAGGATIAAGRFTAESGVIKSIWAYSGHYKPSAENLHNFMNFLEENGVDLKEVEVRSSTKEDYNEDPVPVPVLNDTRSSTSATMEEADLPQAAVPVPALNSTEGDEGDSPPEDEGRGRARYQRTLSGGLQSPRATQVPQRAILERMKSKGELSKSYQLGHRLSLKWSTGAGPRIGCVKDYPMELRMQALEMVDLSPRGLSSTPSPSRRLPPPCFSPTKVASPTSPLAPVQASLPQPS

SEQ ID NO: 3172 - protein, 1043 aa, Zea mays
MRPTTSCHRFPLLLVLLLFLLAGEGRSQPAAGGGPSDRDTLLAVKKAWGSPPQLKSWDPAAAPDHCNWTGVTCATGGVGVVTELILSRQKLTGSVPAPVCALASLTHLDLSYNNLTGAFPGAALYACARLTFLDLSTNQFSGPLPRDIDRLLSRSMEHLNLSTNGFSGEVPPAVAGLPALSSLRLDTNNFTGAYPAAEISNRTGLQTLTLANNAFAPAPVPTEFSKLTNLTFLWMDGMNLTGEIPEAFSSLEQLTLFSMASNNLTGSIPAWVWQHQKLQYIYLFHNVLSGELTRSVTALNLVHIDLSSNQLTGEIPQDFGNLKNLTTLFLYNNQLTGTIPVSIGLLPQLRDIRLFQNELSGELPPELGKHSPLGNLEVCLNNLSGPLRGSLCANGKLFDIVAFNNSFSGELPAALGDCVTLNNLMLYNNNFSGDFPEKVWSFPNLTLVMIQNNSFTGTLPAQISPKLSRIEIGNNMFSGSFPASAAGLKVLHAENNRLGGELPSDMSKLANLTDLSVPGNRIPGSIPTSIKLLQKLNSLDMRGNRLTGAIPQGSIGLLPALTMLDLSDNELSGTIPSDLTNAFNLLNLSSNQLTGEVPAQLQSAAYDRSFLGNRLCARAGSGTNLPTCPGGGRGSHDELSKGLMILFVLLAVIVFGGSIGIAWLLFRHRKESQEATDWKMTAFTQLSFSESDVLGNIREENVIGSGGSGKVYRIHLGSGNGASRDEEGGGGRMVAVKRIWNSRKGDEKLDREFESEVKVLGNIRHNNIVKLLCCISSQEAKLLVYEYMENGSLDRWLHRRDREGAPAPLDWPTRLAIAVDAAKGLSYMHHDCAPPIVHRDVKSSNILLDPDFQAKIADFGLARILARPGEPQSVSAIGGTFGYMAPEYGYRPKVNEKVDVYSFGVVLLELTTGMVANDSGADLCLAEWAWRRYQKGAPFDDVVDEAIREPADVQDILSVFTLGVICTGESPLARPSMKEVLHQLVRCEQIAAEAEACQLVSYGGGGAPVVESWKRGSRRRSTSGSSRWSYDDEDSGDFVAHVV

SEQ ID NO: 3173 - protein, 997 aa, Zea mays
MRIKDNILNPDCPNFRHPLGNGSTPEALVGLSRIRNGRRGLSLLVPPLDRPLVAVIIKTFRKRLKKNPLKLNQTCPLEALVGLFAQATGQTTSVHPTKRTGSAASADRARGLLPQAAAHFPAPLTRPATTHKWKRAPSPASSRQFPRATKPRSSSGRRRRRDQEDEDDLPSDDTSDTDFVADSGDAVENDDSDEEFAPDKDTPPAPAVPEAALPPPVPIRIKNQARNRREKRRRGKKARRDAPPLPWEEWQVANDSWLDERNAADGGVEATDATVAAVPTADPAPEVVLRLLRFQKEWLAWALAQEASVTRGGILADEMGMGKTIQAISLVLTARRLRPPDHHSAASSSNSSVGRTKPQVGCTLVVCPVVAVIQWTEEIERHTASGSVRVLIYHGAKRVTQSFDFNSYDFVITTYSTIEADYRKHIMPPKTRCQYCNKLFYPNKMKVHLMYHCGPNAKRTEAQAKQQSKRKWDSSKEKVKEKRRVHKKGDEVNKDFQELADELGRQLRGQSPLHSVRWERVILDEAHFIKDRRCNTARAVFALESECKWALSGTPLQNRVGELYSLIRFLQIFPYSYYFCKDCSCEILDTSMKKQCDCGHSSVRHFCWWNKYISTPIQYGSTSFEGKRAMTLLKEKVLKGIVLRRTKKGRAADLALPPKIVTLRRDSFDKNEMEFYEALYTQSVTQFDAYVDAGTLMNNYAHIFDLLTRLRQAVDHPYLVAYSKTAGHPEGMKNEGNESMESQCGICHNLAEDVVVTSCDHAFCKTCLIDYSAALGNVSCPSCSIPLTVDLTAQNSVGKVTRSVKGRKCSGILSRLPSLVDFKTSTKIDALREEIRNMIEHDGSAKGIVFSQFTSFLDLIQFSLERSGIKCVQLNGAMNITEKGRAIDTFTHDADCRVFLMSLKAGGVALNLTVASHVFLMDPWWNPAVENQAQDRIHRIGQFKPIKSTRFVIKDTVEERILQLQQKKQLVFEGTVGDSPDAMSKLTEADLKFLFQI

SEQ ID NO: 3174 - protein, 173 aa, Zea mays
MDGDGSKPRGGNKAARPAPAPDATQQPASSAAAGAGEKVDDGRQQPVAPVDESRRAAGGAEPEEEEGGNRNDDAQVEMFYALLANIRAMRRGLPPHDVAASSSVRGGGGDTGDDAVLDSAREKRLRLSADPPWRPAFRMEDFEEPAPAACETRKRTRGTGHDGHGDGASSGHE

SEQ ID NO: 3175 - protein, 44 aa, Zea mays
MAHLGRPGLEAGRVGRLGLVAPGPPSWDQIGPKMTYFTILNSEF

SEQ ID NO: 3176 - protein, 748 aa, Zea mays
MLSSSASRRDAARSGAELPRPHAVAGMARSGELPKGAPSATAPDAVRCEGWMVRHGRRKIGRSFFHTRYFVLDNGVLAYYKKKPRDHMIPLKSIIIDGNCRVEDRGLKTHHGQMIYLLCIYNKKEKENQITMGGYDIEDALAWKRKIELLIDQQQDTTTAKNHKAFASLDFDIDLGGPFSFSDHDSGPEDEEEPRPTLLRRTTIGNGPPDSVLDWTKEADSGLSNQNATSQAYSRKNWRLLRCQNGLRIFEELVEVEYLARSYSRAMRAVGVVEASCEAIFGLVMSMDASRYEWDCSFQYGSLVEEVDGHTAILYHRLQLNWFSMLVWPRDLCYVRYWRRNDDGSYVVLFRSTENQNCGPQPGFVRASIESGGFKISPLKSLNGRPRTQVQHLMQIDVRGWGVNYLPSFQYYSLLQMLNCVAGLREYFSQTDEIHTVPRIPVMHTMVNAASMKKDQNLQEPDSKTKQADNKHLDMVDEESEDDDDYQVPDADVEEEPTKSDSDAKNSDPIDLSWFSGIIRQDTNEKSRNCWAVPDSKIFKVRSKNFPHDKSKVPAGKYLMELVAVDWFKDAKRMDHVARRKGSAVQVAAEKGMFTFLVNIQIPGPSHYSLVLYFVSNSLKKGSLLQRFADGDDDFRNSRLKLIPSVPKGSWIVRQSVGSTPCLLGKAVDCSYLRGPDYLEVDVDIGSSAVANGVLGLVFGVVTTLVVDMAFLIQANTYDELPEQLLGAARLSHIEPSAAVYPVLDNIS

SEQ ID NO: 3177 - protein, 345 aa, Zea mays
MVFCADFAALRPSPADVRVVTSDGSAIRAHCSVLAAASPVLERMIEGTRRGWDAGCTVHVLGAPADAVAAFLRFLYSSPRAEDAVGAHGAALLALAHAYRVPWLKRRAEAAVAARLTAERAVDALKLAALCDAPRLYLACARLAGKDLDAVERSEGWRFAGRHDAALQLNLLQLVHDAHQRKERWERERASQHVYGQLSDAMAFLDRIFAGDGEGWSACASAASSREDGGVRRGLEQLMRHLAACGGRTRKPAACPRCRRALQLLRLHASVCDRAGGEPCNVPLCSNLKAKMQEEGVGKTWKLLVKKVTRARVMSALASSSSREVPEVVKKSWAKYSSSRASRIR

SEQ ID NO: 3178 - protein, 207 aa, Zea mays
MKTKTTVFRWSNHAQSNIKHNLETLDIINSEGAGTQNAKKKQQSVSHCCLAHALNRSESWMQRFIDRFPRCLRAAATIKRLNHHSRPDQHKARKRSINHCAQTPPVDGSDKKKKTLTSMQNKDGTTQETPARDHMVRLAAWLYKQEGGGRSGSGIYMPHWVEDVTGEGRRERGGGAGAARGLCPAVGCVGHSQVEEEWRTRNLSGAV

SEQ ID NO: 3179 - protein, 348 aa, Zea mays
MMANGRFQKQALLPPRSPFPVAAPHAELGPIARPRETPHRHGHQRTSSESFLADEQPSWLDDLLDEPETPARAHGRPGHRRSSSDSFALFEGGSAAGGMYEFDNVLDGMRGGGQVASLAGAPEFFPEPASFGRPWESRQMYRQGGGMPMPGREKNGGRHGPSSSFGEHELGHVPNGVNRKAHGDAAYDQRIVIERKEGLRHSQSETDTKRAKQQYAQRSRVRKLQYIAELERRVQSLQTEGIEVTAEMDFLGQQNIMLDLENKALKQRLESLSQEHLIKRYQQEMFEREIGRLRTLFQQQQQQQHVPQQQAPTHSRSNSRDLDSQFANLSLKHSDPSSGRDAISGLRI

SEQ ID NO: 3180 - protein, 383 aa, Zea mays
MGDLIPGLPDEVARECLVRVGFDQLPVVRRISRQWKSEVESPDYHRQRRAEGLARPVLALVQAQPTAPPDDDDDAGPAHKRSTAANSYRLVLLEPAEGRWTPLPPPPGPSQSLPLFCQVAAAVDGGGQGRKRLLVVVGGWDPETWAPTDAVLVYDFLSGAWRRGAPMPGPRRSFFACAAVGGAVYVAGGHDAEKNALRSALAYDPGADAWAGLPDMAEERDEPRGLCVAGRFVVVGGYPTRAQGRFVASAESFDPAAAASPAWGWAPVHDRLLPEDGACPRTCCAAPRSVGRMYMLRDGHLVARDGAAAWRPVARVPDDALTAPAVSAFPDGRVVVVGSGCHGGDQTVYVLREEGGRPASWSRAPPPPPEFAGHVQASCFLEL

SEQ ID NO: 3181 - protein, 229 aa, Zea mays
MDSEHWISRLAAAKRFYAAQLGHSDRAGMDELEMDEEVRPEFPCPYCYEDHDVGSLCAHLEEEHPFEPQAAACPVCSEMVTKDMVNHITTQHGYLFKNRRRLRRFIIPGSQALSLLSRDLREAHLQVLLGGGGQRSSDNSSSSSATNISADPLLSSFGLGFPTSDAEQASKSTVSIPDDATTVKEAPAQARKLSIDSSLTSEERELKRKQARVRATFVQDLLLSTLFGD

SEQ ID NO: 3182 - protein, 383 aa, Zea mays
MTFRFPVKNQQGTIDGSPFAPATARVSMFRRLMVRVTPAERLAAGDGKEREKDERGGEAEAGSVGLDKMVLSFMEESSAAVERPSRGRCGNCFNGNHQDGSDDEDFDFLPSASAPAAAPAAGGDALELLKGLVQCASTAERNLLADASRIAERCGRKKADARRAVADGLRALGYDAAVCTSRWDKAPSHPAGEHEYIDAVVAEAEPGATDGVRVRLVVEVDFRAEFEVARPTKAYRAALQALPPLFVGTPERLGRVVAVVADAARQSLRKRGLHLPPWRKHEYMRAKWLSPHARSGGGGGPDETPALATPVPAFSGVFEPRFGEKPKAPGDDGIPDGGDDKKATVVVPPSPWRPEAASKLSPQPPQARRKVVTGLASLLLLAS

SEQ ID NO: 3183 - protein, 390 aa, Zea mays
MTNEEAVVLAVKETVRYGLFLGTFAGSYVSVDEYIAAVWGRKRTARWRSFLAGLIAGPSMLLTGPGTQHTSLAIYILMRAAVLASRCGIKSKRFGKICKPLTWSHGDVFLMCLSSAQILSAYILKQDSLPSSYKSFLNKHGGKDLTILQGVKDVVNHTAFSNLVGIEKYYKSVGVDIKLDPNMKVPCSIVHGNQSCTGHVFSFLLQAYGRAVPVYVPVYLVPALVVHRQHLMKRPYSIIGKSFLGVARSSLFLSVYCASAWAWTCLLFRIFRRANTPLVILGTFPTGLALLIEKKSRRIEISLYCLARAIESFFTWMTDAGLCPPILQIKRADVVVFSIATSIIMHCYAQEREVFRSKYLNVLDWVFGVPPPPDSEDKNCYLPDEAKKCQ

SEQ ID NO: 3184 - protein, 790 aa, Zea mays
MPSSRRTTGRGGAGAGAGGAGAGDAGGGDGDRVPRFMGNNRDHNPRELRSWARRTGFHPSAFFSGESNSSFASSAAPQPPPPPPPASSRRPPRPPPERDPDPDAEDDLDPAPGRGRGRRPRRRIDLRGELQIPPGFGREEAVPGSAEPDARRGGARGDATRRNGGVERGQAPANAGRNGNGALADADARKKAEDAEAKRKAEEAEARRKKEDEERDAELAAYYQEQWANEDEGAAGAAAAAAETAPLYEASGLRCGVTENPGWAPLIFYGIQHYLSIAGSLVFVPLILVPTMGGSDEDTATVISTMLLISGLTTILHTFLGSRLPLIQGSSFVYLAPALVIANSEEFRNLSDNKFKHIMRELQGAILVGSVFQIILGYTGLMSLFLRLINPVVVAPTIAAVGLAFFSYGFPQAGSCVEISMPLILLVLLCTLYLRKISLFGNHIFLVYAVPLSVAIVWAYSFFLTAGGAYNFKGCSSNIPSSNILLDSCRRHLETMRRCRTDVSSAWRTAAWVRIPYPFQWGPPTFHSKTGIIMIIVSLVASVDSLSSYHAASLLVNLSPPTRGVVSRAIGLEGISSFIAGVWGTGTGSITLTENIHTLETTKMASRRALQLGAAVLVVCSFFGKIGALLASIPLALAASVLCFTWALIVALGLSTLRYTQAASSRNLIIVGFTLFISLSIPAYFQQYEPSSNLILPSYLLPYAAASSGPVRTASSGLNYAVNALLSINVVVALLVALILDNTVPGSRQERGVYVWTDPKSLEVDPATLEPYRLPEKISCWFRWAKCVGM

SEQ ID NO: 3185 - protein, 518 aa, Zea mays
MDDAAENILASLGRVHLVDLMASEGLPSDSYKMCVSTLMQSLAQYSAAIIQLSPADGALLRSGLDSARFFFHQRGYNSNEAVHSDDSREWCKTSGYYVDSQMCLEMYDYRPGITATDPSGEMELPPSGLPDIFSVLGKVSRDILDAISFSLNLRSCAFTEILDNIPLRSQEVSSSVLSACCHSRPSLEGGHQHSIASQDNGHLLMFSEQEQQIDKTLLTLVKSDMSGLYIKDLHGHWILVDGDIGPHDVIVYSGLALYQETAGYVNPAVHKTEVGIHGCMFGRCSLMFKFMPRSVARLSGSEMRAAGHGVDAQFQVPIQVNDFMQTDRFSDQLFPKTEPSLHTEQDSASFNSVMNKKKGNTRTKPLPPSKRLRQEAQRVLKERVQDIADKKGVKLRFCNLKECESHILSLDSPCENTRTEIGWPQGVPFVHPHDLPNKAKLGFLEAYEPGWTASQQEMELDNCLRHCEPHPDHSSLFSNQIVLPVHCTLAKSEICVDSALCSALEYQSLQKKTDLDGT

SEQ ID NO: 3186 - protein, 126 aa, Zea mays
MSWPTSPPSARAGAGGQPAAAAGGARAAVQPAALVGQAGVALGGSRASSSQALAALGGAGSQALAALGGSRAGSQALAAAGGSHAGGQPGVPAVGARPGFQPAAGQRAAGSGRAASTKKARDDDQV

SEQ ID NO: 3187 - protein, 625 aa, Zea mays
MAAAVTAAVFVLFAAMSTTRAPAALVEQTFVVSQMSMTHLCRETMVTVVNGQLPGPVIEATEGDSVAVHVVNQSPHNLTIHWHGVKQQRNCWADGVPMVTQCPILPGHNFTYRFDVAGQEGTLWWHAHVFSLRGTVHGAFIIRPRRRADDDSYYPFPKPHAEVPIVIGEWWETDLEQMDRDFAHGHLDDQPSAATINGKLGDLFRACEGAGVEDGYVLDVEPGKTYLLRVVNAALFSEYYLRIAGHVFTVVAGDANYVRPYRTDVLAVSPGETVDALVVASARPASSYYMVAKPILTPPPDPQIPAFATRATVRYTTAYSSGAPRSSRRRRPRSSSDDDAPVAPEMPDDYDMMTSFYFRGNLTSLRRQPVPSAQADERMFVALALGSVCRRRGQRWCERGDSDETITVATMNNVSFELPPAAATTPMLDAYYRNRSGNGVDDDDDDVAVVVRLPDVPPRAFNFTDRALQPTGPEEEELEPTSRATAVRRFRHGAVVDLVFQSTALWQGDSNPMHLHGHDMFVLAQGLGNYDAARDVARYNLVDPPVRNTVLVPSLGWAAVRFVADNPGMWFMHCHYDFHLSMGMAAVFIVEDGTTADTSLPPPPAVVSSCSHGNVLMPGEILPQS

SEQ ID NO: 3188 - protein, 311 aa, Zea mays
MARQLFLHPVLLAAACLLVSVVLCNAGVAQAAWWWPRWDSLFPSRGQQQHHGGYDYHDNGDGSSKSRVASIVTQELYGEMFKHKDDAACPAHGFYTYASFLAAAARFPEFGGDGDLATRKREVAAFLAQVSHETTGGWATAPDGPFAWGLCFKEEITPPIDYCDASSTQWPCVAGKSYHGRGPIQLSWNFNYGPAGQALGFDGLGSPDVVAADPEVAFKTALWFWMTPRAPKPSCHDVMVGRYRPSAADVAANRTAGYGLTTNIINGGIECGKSGVPQVDDRIGFFREYCKLLRVDVGTNLDCAQQQPYSS

SEQ ID NO: 3189 - protein, 168 aa, Zea mays
MTKQRTEQGIAAVGPACLARGRRRNHPERETRADGVGHMSQGERAPRVARGGPTDSRRELNGADREELGVLELEAKPDEMGRAFQGGTSGGGALGDGLSELEQAGSLKASSTTRGKERGGHQGREHRKQERAPWLEAESEPEQPGKELRTTNSEEGCPATRTWRWSTG

SEQ ID NO: 3190 - protein, 392 aa, Zea mays
MALTPVLLLLLAYCLSGVSSSAGPPPRSFTSLFALGDSYIDAGNFVTMATPVAPVWVDKPPYGMTFFERPTGRFSDGRVIVDFVAAALGVPFLPASLANSSDDDVARRGGVNFAVGGATAVDVAFFERRRLVPFKLLNNSLDVQLGWFEELEPSLCNATAETAGSYGGGRCFSRSLFLVGEFGVNDYTFLWTANKTESEVMAFVPRVVRTIASAVERLIVRDGAAHVVVTGNPPIGCSPTLLTLLRRTSRPTSAADDDDYDHIGCLRGVNDVARHHNALLGAAVVGLRARHPRATIVFADFYTPIRRILENPNQFGVVVSDVLKACCGTGGAYNWNGSAVCGMPGVPACANPSAYVSWDGVHFTEAVNRYVAEGWLYGPYAHPPILKAMRRP

SEQ ID NO: 3191 - protein, 491 aa, Zea mays
MDAQAQPFTRRALSRSCGSKGSRLSVDHPPPPLAGGPSADKGVAGSSSSLAVPPEPARREGPPSDAEKVREKFSKLLLGEDMSGTGKGVTSALALSNAITNLAASVFGEQRRLQPMADDQKSRWKKEVDWLLSVADHIVEFVPSQQVAENGTSVEIMITQQRQDLQMNIPALRKLDAMLLEYLDSFAGKQEFWYASKDADGPGKGSTPRQDDKWWLPTVRVPPDGLSGAYSKWLQNQKDLVAQVLKAAMAINANVLMEMEVPESYTESLPKNGKSTLGDSVYRLITDDHFDPEELLRSVDSSDEHSIVDLKNRIEASAVIWQKKMTHNKDSKLPWGHSHEKRGMFEGRAENVLLLIKHRFPGIAQSALDISKIQCNKDVGLAILESYSRTLESLAFTVMSRIEDVLSADLAARDLRNTESMRIAASLASDDTDKVVSDAKAEVEKTGRMEPVSPALSDLVGPKLTKISPVATKRFSYLENLGGTRSPIARH

SEQ ID NO: 3192 - protein, 418 aa, Zea mays
MTKISRSLLVVIALVLLGPHLPPSEALTPKQGVRSKTFLSPPILLRPGDVADKFYYDIPFPRGHLALKSFNGEVVDERGAPVPLHETYLHHWVVQPYYALVVSAEGGSSRPRTIPARNAGVCSGHTLGQYYGLGSETRRTATWVPDPYGIEIGDPAAAPAEGYEQRWLLNVHAIDTRGAADRTMACTECRCDVYNVTADWRGHAIEPGYAGGLRCCYDGTRCGAAAEGAEGKARTVFLRYTVMWRDWSPAAVLPVRIYIFDVAGCGVEYDVEEQCSGGAGGECVHVKTATQALPRGGDVVFGVAHQHAGGAGASLHGADGRLLCESAATYGGGREAGDEAGYIVGMSTCYPRPGAVTVRDGEPLTVVSRYSSDRRHTGVMGLFYILVADHARQLPPQEGLCFSFPVPWCLPSWLSSNL

SEQ ID NO: 3193 - protein, 536 aa, Zea mays
MTRIFVQRGTAGSSSSSGRSGSQSAQQPAAAAREELPLQPQPQLPELLAIDDVTEHLNEGNENNSSRIKFLRTDDTISESSSYAEERAAREKPPKDDSNVINPTSLVEEPIVLHTPDQIEHGNSVPSGTNSSQMVGAASHPPPPPAPPPKSLLGNSGLWRMGPGSSNSVRIGSPRRPVAWPPVAARTSASGSRPSSPRSLVDGEGYNSADEQGPCYASSYDDSERERMFEHDLRRVKGLEIRKTAEDGNCLFRAVADQVYGDAEAYDMARQMCVDYMERERDHFSQFITESFTLYCKRKRRDKVYGNNVEIQAFAEMYNRPIHIYSYSTEPINIFQGSYNTDTPPIRLSYHHGNHYNSVVDPRRQTIGAGLGFSSFRGTNVDRDQVKAAIKAQQDQQIDNALMAEGRFYSDLELTEREIERMVMEASRSEYLAKEKKLNIRESSTSGAEPSSSAAISGSSRSVAGADRSSEDYFVLPDTVLTRSMQLLLAMGFGYNQVMEAYSIFGEDVDSMVCYLVETGGASAGGSNRRKGKAAE

SEQ ID NO: 3194 - protein, 1262 aa, Zea mays
MSSPENGAAPEASGKKKKKAEEEEVVAKVPFLKLFSFADRWDCVLMAVGSLGACAHGASVPVFFIFFGKLINIIGLAYLFPTTVSGRVAKYSLDFVYLGIVIFFSSWTEVACWMHTGERQAAKMRLAYLRAMLDQDIAVFDTEASTGEVINAITSDILVVQDAISEKVGNFMHYISRFLAGFAIGFSQVWQISLVTLAIVPLIAIAGGTYAYVTIGLMARVRKSYVKAGEIAEEVIGNVRTVQAFVGEEKAVRSYREALLRTYKYGKRGGLAKGLGLGSMHSVLFLSWALLIWFTSVVVHKRISNGGESFTTMLNVVIAGLSLGQAAPNISTFLRARTAAYPIFQMIERSTVNTASSRTGRTLPVVDGHIQFRNVDFSYPSRPDVVILDRFSLNFPAGKIVALVGGSGSGKSTVVSLIERFYEPLSGSILLDGHDIKELDVKWLRRQIGLVNQEPALFATSIRENILYGKGDATAEEINHAAKLSEAITFINHLPDRYETQVGERGIQLSGGQKQRIAISRAILKNPSILLLDEATSALDAESEKSVQEALDRVMVGRTTVVIAHRLSTIRNADTIAVVDGGRIVETGTHEQLMANPYSAYSSLIQLQEAAQLQHKPSLSDSASITRPLSFKYSRELSGRTSMGASFRSDKDSISRYGGAGEAHDEVRKGKPVSMKKLYSMVRPDWFFGLSGTISAFVAGSQMPLFALGVTQALVSYYMGWETTKLEVRKIAVLFCCGAVLTVVFHVIEHLSFGIMGERLTLRVREKMFSAILRNEIGWFDDTSNTSAMLSSRLEADATLVRTIVVDRSTILLQNVGMIVTSLIIAFILNWRITLVVLATYPLMVSGHISEKMFMKGYGGNLGKSYLKANMLAAEAVSNIRTVAAFCSEEKVIKLYADELREPSKRSFRRGQGAGLFYGVSQFFLFSSYALALWYGSVLMSKELASFKSVMKSFMVLIVTALAMGETLAMAPDIIKGNQMASSVFEILDRKTDVRIDTGEDIKRVEGLIELRGIEFRYPSRPDVTVFKGLDLLMKAGKSMALVGMSGSGKSTVLSLILRFYDPIAGRVLIDGKDVKKLKLKCLRKHIGLVQQEPALFATTIYDNILYGKDGATEAEVVEAAKLANAHSFISSLPEGYKTKVGERGVQLSGGQKQRIAIARAIVKDPAILLLDEATSALDVESERVVQQALNRVMRNRTTVMVAHRLSTVKNADVISVLQDGKIIEQGAHQHLIEDKNGAYHKLVSLQQQQQMQTQQSSSEDI

SEQ ID NO: 3195 - protein, 358 aa, Zea mays
MGKIDMSTDEESDCVAICPPNRNAGHEEVVSGSHDEDSSGKQENPYAVNSHMDSNGQEDVSVNLDLLKLIHQQESSVSNSPTKPAVARQQGSGHTVLEPCAVAPERRSSGAGNIARIPHPTSSGEKLSDKSSSSPRSMAKKSPSFTPRKPLQSDNTSHSQDDDSYSVTSSTVTSARAGKTKKTTVAVAPTFVCANRAEKRGEFYTKLEEKRKALEEEKLQAEARKREEEEEALRQLRKNLVVRAKPMPSFYQEGPPPKVELKKVPPTRAKSPKLTRRKSCSETPHTPEGGNGSAVCCRLHRHSIGNARDVSSKAQCSPKSASKAGSATRSRVTKSREDLKASVKKVGLPSAANFAVQT

SEQ ID NO: 3196 - protein, 414 aa, Zea mays
MDLERPPPASAAEAAGAAACSICLDPVLACVAGRSVAKLQCGHEFHLDCIGSAFNAKGAMQCPNCRKIEKGRWLYASGRHPPADIDMGGWVTSDNYDITSELPFGFQWCPFSGFTQLASMLGVREAEPTYHTTGDHSSAASSSLVCPYLALRGFLHPVNVPSTSNSGAESTSFHRHSTGLEGHVTPDLNNAPVFHATESRNHDSEHRHLSNLPVSGTPEYSMTPFGIGVPRYDSGSQQGFRSYAHHHPLIHRLTPRSGSNLVAPLGSVPAVVAETRGHGHGAPGHMYQHSSVQGSPFPPTTRRVRPRALTITSFIAATSSAEIAGPLGHGFPAPGAVNRSVSDAEGIDRAYTWGREGYDLFPWTPAEWGTFNPMQNHAHGSFTRRPAGERMPQSRPENGYQPPVPTSQRMPPFL

SEQ ID NO: 3197 - protein, 438 aa, Zea mays
MNRGEFQTSLVQQMIWSGGGGGNTTAAGSSNIMSSGFKQSCHEDQQEASRNLQLLPSLSSPSSLLFSNAQQFPHTTSSGQQLAHTNAGGAAAGSLPSLDDDGGSGQDSHMPESWSQMLLGEFAGERYAATACLLSKGVEDWGDHAAAAASACMVGGGGGVEEEGSAAMPLYSLYGGGSHSHSHLAAAGDHEMPPAPAAAAAGANKSQLSQMLLASSPRSCVTTSLGSNMLDFSNNGVPPAPDQLKSHHHHQSDNSSECNSTVTGSAIKKPRVQASSSAQSTLKVRKERLGDRITALHQIVSPFGKTDTASVLQETIGYIRFLLGQIEALSYPYMGHGNGTSIQNGPTTGERNHAGLLPDQYPGQLLNHNNNTGARQPAAVGQPDEQQQQQGGANNNDETKKDLRSRGLCLVPVSCTSHFGGDNAADYWAPAPLGGILR

SEQ ID NO: 3198 - protein, 371 aa, Zea mays
MRIRELRDGLEVEDDEREEQGSEVGSGYGEVVAVVRLRAKRAIVGAGARVLFYPTLLYNVLRNRFDGEFRWWDRIDKYVLLGAVPFSSDVLRLKQLGVRGVVTLNEPYETLVPTSLYQAHGINHLKIPTRDYLFAPSLEHICRAVDFIHCNEVQGGSTYVHCKAGRGRSTTIVLCFLIKYRNMTPEVALDHARSVRPRVLLAPAQWQAVKMFSKLNARCLSIQSSNPTCSALSYEESSELSSTLSSRCLRIQSSNEVSITCEESNEASFGDPEVDGYTTTEFDTEHFVLPRCRSMLSRPTSPTGCSDAVFITEEDLEGYETYADDGKDVVEVQVVVRHKPIMRKLSCFLGSLKLTGNCEPPPGRLTEVRAC

SEQ ID NO: 3199 - protein, 936 aa, Zea mays
MDRRSWLWKRKSLDKSPGESDSSGSASSHSEPSFDDQEPKPVSSNSSPNHSHSPDVSSRIIYNENQEAERAESLNEKLVLATSSNDSSPQHDQSMKPDIYQSPLLFPNIRNDDVPDSVKNLNEKVSPKFKVDDVQDSVKSLNEKLSAALLTINDKDDLVKQHTRVAEEAVAGWEQAEAEVASLKQLLETASKKNTSLEDQVSHLDDALKECVRQLRQAREEQENKIHETVAKKSKELESEKFELQHHIAELSKQLQATKLEATTVRVQRDLQEKLQIVEKENKDLKVELLALSKDLKILARERDLSNQAAETASKLHLESVKKITRVEAECLKLRHLTRRTSLTNDSRLITNSACMESQTDSQSDSGEHMLVDEMKNSDSWATALIAELDQFKNANNDTRNLVNNSVEIDLMDDFLEMEKLAALPEVDCVSSSFGAETDSDQGVSRDKSSKVKTEPLQCQVTDLHAKIEKIEGEKRELEMALADARVQLGTSCDALMVANNRLIDLQMQLDLANESKHAAFGEAERLNGERKDLALQLESRSSQVDELQLMVASLEKNVDRKVLELQLELVSVEAADLRKTVASLEEKIDAEITLSMQHKTNADLAEASKESLEAQLQSANTEIGKLNGIVQTLENEVRKETDSREELLKQIEAMKIESERSLSVVSTKESLEVQLQVANSEVAKLRGMVNALECDAANEKAYSSDLQMQLEAVEGIRKVLESELESSHQEVMRLKEKVSSLEARIKDQTSLLVEYTAKSEDAVSRKKAMEGQLEAANLEVTKLRNKVSLIQGKVEQEKLLSEEYEAKCRKLEAQVLRDSREAKLWRLTNSNGDLKVKQEKELVSAAGKLAECQKTIANLGRQLKSLTDLDGVVADPEKLESRDTHLDFRDGGDVADGLYELGLPKRNGSCLSPLRSDPSPRGLPSLSSYLSKTKR

SEQ ID NO: 3200 - protein, 294 aa, Zea mays
MAKSYTLLFVALVVLALLVSPIACSRKLAKPNKPKPTHKPAARVTPGSNHTDIPAVSAAYGSGGWLSAGATYYGAPNGDGSDGGACGYQTAVGQRPFSSMIAAGSPSLFKGGKGCGACYEVKCDSNPACSGQPATVVITDECPGGVCLAEAAHFDMSGTSMGAMAKPGMADRLRSAGILKIQYKRVPCKYSGVNIAFRVDQGSNPFYLEVLIEFEDGDGDLSAVHLMEAGCGTWTPMVQNWGALWRYNSNTGKALKAPFSLRLTSDSGRVLVANNVIPAGWNPGATYRSLVNYS

SEQ ID NO: 3201 - protein, 541 aa, Zea mays
MSGFLAVVGKVGTFLLWVLFLVLQTATRIVGSLLASSAEQQDDHHQESAAARRRSPPASPHPELYEPASASLAQLWDPPPLPHLAFAPAADESSSSSSLRRRASAPLPRADEDFVVPSSAYSRPTVGVAHTHSVSAPPLRAIETRAVPSRLVTAGGKRPRLERKYSKIVDQYRSLDEVIEALAQAGLESSNLIIGIDFTKSNEWTGKNCFNGMSLHNISDNPNPYEQAISIIGKTLSAFDEDNLIPCFGFGDASTHDQDVFAFYPDERPCNGFQEALARYREIVPHLRLSGPTSFAPIIDMATTIVEQSGGQYHVLVIIADGQVTRSVDTEFGQLSTQEQMTVDAIVQASQFPLSIILVGVGDGPWDMMKEFDDNIPARSFDNFQFVNFTAIMSKKISQSKKETEFALSALMEIPLQYKATLELGILGRRIGESPERIPLPPPFASYSTVSRAEPSRANSYRSVPSHPREEPAVNSTITASVTSPSAAESRVLEPQMCPVCLSKPRDMAFGCGHQTCSECGPQVTDCPICRRPIDTRVKLY

SEQ ID NO: 3202 - protein, 241 aa, Zea mays
MAGDVQVTGAAGPGAVGLAAAAWSGRRGEGRRRGAGSAGGAAAWAGRGRLGRSGGAARSRAAGRRGGEAGATLGAGLRGPERAARQGAGACGRTGCRARRAGVGSSAAGGDEAVRRPGRVASCSAGRSVQVGGAGPGRGEAGARRAWPGPRRQSATSGGYGSAAPEAAGGLEQAGVRAQAAGGLAQARPSARRRGSATDARVRETGEGGAPGREAGGRRWEGEETAARRGQGGGRSFGTDG

SEQ ID NO: 3203 - protein, 452 aa, Zea mays
MANALLGGLWAIVVVAVVVGVVATVTHSGKKAGDDFTVPGEASIATSGKSVESLCAPTLYKESCEKTLSQATNGTENPKEVFHSVAKVALESVKTAVEQSKTIGEAKASDSMTESAREDCKKLLEDAVDDLRGMLEMAGGDIKVLISRSDDLETWLTGVMTFMDTCIDGFVDEKLKADMHTVLRNATELSSNALAITNSLGGILKKLDLGMFKKDSRRRLLSEQDEKGWPVWMRSPERKLLAAGNQPKPNAVVAKDGSGQFKTIQQAVDAMPKGQQGRYVIYVKAGLYDEIVMVPKDKVNVFMYGDGPKQSRVTGRKSFADGITTMKTATFCERAFFFTTILYVHRRARNFMDMDWQPSRRPGSSARTWASTTRPARRGTRRWRSAFRETSRRSTTAGSTRSRTRCTCTPGASSSATASSPAPLTSSSATRRRCSRTASSSRGGPWTTSRTR

SEQ ID NO: 3204 - protein, 577 aa, Zea mays
MAGQTSKAKEAGKDDREEPGAEAAKEKLVPSHQQQESPASVVDKDSSGVSSVPGDESPVLEGDSVELKVEENLDGNGNKENKTSQKSSTSDGFASAKVSDGTSSLRKTSGSVAMSTRADFTESGKSSMCRASTASDISDESSCSSMSSATTKPHKGNDSRWEAIHVVKSRDKVLGLNHFRLLKKLGSGDIGSVYLSELSGTRSYFAMKVMDKTSLASRKKLLRAQTEREILQSLDHPFLPTLYTHFETDKFSCLVMEFCPGGDLHTLRQRQPGKYFSEQAAKFYVAEVLLALEYLHMLGIIYRDLKPENVLVREDGHIMLSDFDLSLRCSVSLTVIKSANPGLDALQRNNAAYCAQPACIEPSCIQPSCVAPTTCFGPRFFSKSKSKSKSKPKKEKSKPDGPNQENLFPELIAEPTDARSMSFVGTHEYLAPEIIKGEGHGSAVDWWTFGIFLYELLFGKTPFKGSGNRATLFNVVGQPLRFPESPIVSFSARDMIRGLLVKDPQHRLGYKRGATEIKQHPFFEGVNWALIRCASPPDIPKPLELECRPKQVPSANGKVAPVANQKGPDNYLEFEFF

SEQ ID NO: 3205 - protein, 624 aa, Zea mays
MSQEGANLPQEVVGSHDQATAPHGSIPAPADSNPSSVSNLASAVNNGGSSECASPAVLSAGEDNNAASSKTASPAVLSAGEDNNAASSKTASPAVLHAADDNNAASKIAGPAVLLAGEENKAKLKLASPASLLAGEEKGNNADEFKLASPRMLHDCDDNNAGSHAGVRNCNAAQSKLANPAVLHAGDDKKGGSKIAGPEVPHASVTSTTGSKLNGPAALHAGNDNDSGGSRLPNPAVLHASKDMDNNAGRPKFASPVLLHAGEDNKARTKLAIQAGGGGNAGAGSSRLTRSAALHAGKDNGAGSKPAIQVVPRLHAGGKDNNAGSFKAARPSAADSGESNAKEGKSNVAGEQRAREAGVGCGGGKGNAAAVEDVDHDLHIFTERERRKKMKNMFSTLHALLPQLPDKADKATIVGEAVTYIKTLEGTVQKLEKLKLERKRALAAQQQLMAGAGSNRASSARHPAPAPSSPSSSSREANVADMVHGWHAQQAAANKALAAEAGAGGSSSAAASLPRGAVPFPAPAAGFQTWSGQNVVVSVASNEAYINLHSPRQPAGTLTKALFVLERHRIDVVTTTISTQDGFHMYGIHARVNSASASARFPENLCAEDRFKLAVSEMLQLINI

SEQ ID NO: 3206 - protein, 300 aa, Zea mays
MGEILGLVQVDQSTVAIKENFGKFSEVLEPGCHFLPWCIGQQIAGYLSLRVRQLDVRCETKTKDNVFVTVVASVQYRALADKASDAFYKLSNTREQIQSYVFDALAATLLFPHRGCFALLRSSVREWTKLKTWGLVQTGIDMCLGLRFESSHGRAVGGARSEPRAMRRRRISSANTHGGGMGRNLPRAAADGEKASRRARQGRSSAAPWFGRDMGGASQKQGWWVLGGGRSGWGMEVGERDRGTDADLGMGHEIAVEDAEIAAGEGKRRDCRGGGRGGRDAGRGCTSGGRTCTTVCERLQ

SEQ ID NO: 3207 - protein, 319 aa, Zea mays
MSEIELVQCSRAGKEALQEPESEPQRKWLPESEPQRKWVALVSDAVLLGNEDDRAQEIVHGTDMLLELKDPPLPSYLLLHPRVSTNTRRTSSPLSAYVLAANNRSACILLQIVEGNRPDIFLCDTHRCTVTILPPLPSYLWSRPGIYIRPHLSIGLIADPYHRGHYVVAQLQPTTSFHNPNRLLCYSTAKHQWFALQITRQTAHLYNPLSENGVLAHDGRLWWVALAHGIFFCDPFTPVLQELRLRYLRLPADCHGYVALEPRIRTLIHQRRCVRPSEGQLRFVEIHGLAYDDVLVDAPANPTVRMWTLEDPERPDPWT

SEQ ID NO: 3208 - protein, 59 aa, Zea mays
METNRAGSQGRDVTGNKQGSSAAWIFGLARAGSQGLTGSRSLARGWARALAGHQTLVAW

SEQ ID NO: 3209 - protein, 1103 aa, Zea mays
MASDSDVDEDELLQIALQEQAARDLSHQRPPAANKPVVNLVRPPAPNARGGNGRAGGAAAKARQPSRGGDEDEDSDVELLSISSGEEDDNPRARGPPPPRGGGGGRAGARRAVARDDGDFDDEEPRSWKRVDEAELARRVREMREAKVAPNIQELDQKAAAAAAAARKALTSVQTLPKGVEVLDPLGLGVIDNKSLRLITDASVSSPISREKSQGLDPNMRDKVIYSSPSFDPKVFLSWVHKDTSAADLEAGALTLKTDLKGRTQQKKQLVKENFDCFVSCKTTIDDIESKLRQIEEDPEGAGTAHLYSVTQKISGVANRAFEPLFERQAQAEKIRSVQGMLQRFRTLFNLPSAIRGNIRKGEYDLAVREYQKAKSIVLPSHVGILKRVLEEVEKVMQEFRGMLYKSMEDPHLDFAELENIVRLLLELEPETDPVWHYLNIQNSRIHGLFEKCTQDHELRMEVLQNKIREKVLSDSKWRQLQQDSNKSLEVDSAICDSPRADQLSTNFMAEEADSLRATYTRRLTSVLIQHVPAFWRLALSVFSGKFAKTASGNVVSDSDMNAKPSANKNDDKGGDVKYTNHTLDEVASMVRDTISAFDTKVQSTFRDFEECNILCPYMSDTIKEIAKACQTLEGKDSSPTAVKLLRTLHFQMTKLYVLRLCSWMRATTKEISKDDTWVILSTLERNKSPYAISCMPLEFRDIIISAMDRIDTMILNLMSETAKSYDISQPLQEINESVRLAFLNSFLDFAGYLERFGGELTENRPNNENNYVQNGYINGTRETSANTDGDLHKKLLVVLSNIGYCKAELSEELYTTYRHIWSPVRNNDERSSDMRDLMTSFSALEEKVLDQYTFAKSNLIRSSAQSYLLDPGIYWGAAPMVKSIRDATLDLLHILVAVHAEIYSGARPLLEKTMKILVEGLVDIFLSVFHENKTKGIRLLDANGFCQLMLELEYFETVLHTYFSPEAQQAMKSLQENLLEKACESIAEAMENPGHQRRPTRGSEDASSDDRQPSVSPDDLLLLAQQYSSDLLQGELERTRLNIACFMESALQSTSAPAGSKPAAYSSYHAQVPQHAPIQTSSPSFRRQQTGTSSPVVSRRRR

SEQ ID NO: 3210 - protein, 357 aa, Zea mays
MGTGGSCAAAVRGARPAVGMVAVELAFSALQIFIKLALDDGMDERVLVAYRLMFATAFLCPLAFLVERIAINQNLIVLAMKLTNSTTIVTALSNLTPQSTFIVAILTRQETVKLGKASGRAKLVGTLVGLGGAMLVTFYRGPEIGFMHRLARTAGLRDAGRLSGGGGHGTSSAAARVVGSFLAITSCFSYAIWLSIQARVGEVFPCHYSIAALVCLFGAVQSALLALCFHRDMAHWRLGLNVRLYSSAYAGIVASGFAFPLMSWCLRERGPLYVAMFGPLIIVFVAVLSSVFLDETLHLGIALGAVLIVAGLYIVLWGKAREAQEKAAAAVLTDEELGNDSSMAPAAANTKYNGETK

SEQ ID NO: 3211 - protein, 338 aa, Zea mays
MAAVQAQEALHIEEEYNSMIRSQSNVCFLSKKQRSREMRALLEAQEDLTISPVLHNMMVHRRTSSEIELAMADYFDASVEALEMCRQLLQNIKDAQSNYQCMDSFVASISAAGCAGAPPALNFPYCRSNPFSTTTRSNLRSIHDRYFCVLQSIRSSHRRVGRKLKMVKAVKKLSRALLVVAGGAAAAAALGTGAHLLFFGLILIGTATAGALKTWIAPRGRGTKKPSGSKTMSSSLLRLHEQLDAAAKGTYVLGQDLDTVSNLVARLSDAIERDNAMARWCAERADEGSSVLEMANELRRSCSSSRSLTDELEEHVSMFLATIHRARLLVIREFSKKA

SEQ ID NO: 3212 - protein, 248 aa, Zea mays
MDEYQTRRSPAGERFIGMFSSPSTPSSSPTEPSFVAGDELHEDDFLFSSPDAAAPQPDGPRSPGRGAPQGHLGLLAALALHEGDRRLLVRGGHGGGVAAAASAGTLLRRKATIAAAAASASATVASGNGGALSPTQSPTSSARAIPATAKPQNAGPARPYHQSAPVKVPVRPLRKPATGRWDEFDDDADFGRGDAAMLPPHEMVARASAGGAGPAAPFSMLEGAGRTLKGRDLRRVRDAVLRQTGFLD

SEQ ID NO: 3213 - protein, 383 aa, Zea mays
MTSPSSHHPDSTSASSTPRAGVGNGGIHHLHPPSLHPAPAPTPAAPPAQAQAAHGGPQVRLMCSFGGRILPRPGDRQLRYVGGETRIVSFPRAVTSFAALVAALAKVAPVLFAPGAPRPSLKYQLPQDDLDSLVSITSDDDVDHLMDELDRIQDLSANVARPPRLRVFLFAPAPDAAFGSVFSGTTSEAASTDQWFVDALNAPAPQPHPTERGRSEASSIVSEVPDYLFGLETTSGEPSPGPAAARAKSDATETPRHHDDDECDVPPSARQMPYVVEGASSWPAPPPPYMAQPVYYFPVPPPVHYLEPSAQGGYMPRPVYHIVGGGGSEAPGGDLHAAGGVYGVPQHMQAFPPMMYAPPRAVVYNYNSEGMPSLPPEGGAHSS

SEQ ID NO: 3214 - protein, 541 aa, Zea mays
MAMSMAMSKVFTSRHSEHLHHRLVAASSQAAAPRLPLLPRSPGLAAVTVAYRPRLRPASPRSTSSESDLSPTPPSERTMTAWDLASLWVGLVVGVPSYYLAGSLVDLGMSALQGVATVAFANLIVLVTLVLTAAPAVTHGLPFPVLARAAFGVRGAHVPAVIRALIGCGWFGIESWIGGRAIFLLLPSRLKSYQPLLAPVPGLGVAPLEFACFLAFWAAQLGVIMHGMEGIRKLEKLSAPVLIVLTSALLAWAYTSAGGFGRILSLPPRLTGAEFWKVFFPSLTANISFWATVAINIPDFARYARSQADQVLGQAGLPVFMGMFTFAGLAITSATEAIFGHVISDPIELLGRIGGPATTFLAIFGIGLATITTNIAANVVAPANALVSMSPRRFTFAKGAFVTALLGIAFQPWRLLSSSESFVYTWLLGYSALMGPIGGVVLADHYIVRRTALDVDALYSEDSGSPYYFQGGFNVASMVAMAAGVAPIVPGFLHKVGVLPSVPSAFVTSYNNAWFVSFFVAGAVYCLLCNRRGKQEREHYS

SEQ ID NO: 3215 - protein, 812 aa, Zea mays
MKSPPVMDPEAPPSPPLPGTPPDDEEEKRGGRNGVPWRMTLSLAYQSLGVVYGDLSTSPLYVYKAAFAEDIQHTESNEEILGVLSFVFWTLTLVPLLKYVCVVLRADDHGEGGTFALYSLLCRHARAALLPPGRTAAGDEDQFLDGADGGTKKATAQNGNAVTLGGGAAASVRRLLERHKVLQRVLLVLALVGTCMVIGDGVLTPAISVFSAVSGLELSMEKEHHKYVELPIACIILVCLFALQHYGTHRVGFIFAPVVVTWLLCISVIGVYNIIHWEPTVYRALSPYYMYKFLRKTQRGGWMSLGGILLCVTGSEAMFADLGHFNQLSIQIAFTCMVYPALILAYMGQAAYLCKHHTMESDYRIGFYVSVPEKIRWPVMAIAILAAVVGSQAVITGTFSMIKQCTSLGCFPRVKIIHTSAKVHGQIYIPEINWILMILCLAVTIGFRNTKHLGNASGLAVITVMLVTTCLMSLVIVLCWHKSIFLAIGFIVFFGTIEALYFSAALIKFREGAWVPIVLAFIFILIMCIWHYGTIKRYEFDVQSKVSINWLLGLSPNLGIVRVRGIGLIHTELETGVPAIFSHFVTNLPAFHQVLIFMCIKNVPIPHVRPEERFLVGRIGPKQYRMYRCIVRYGYHDFHKDDIEFEKELVCSVAEFIRSGSSKLNGMPEEFDEEEQRMAVVRSNSIRMLEEEATVEKTVGPSQASREIRSPSPTPPPVVGPKKRVRFVLPAASPKPNAGVQEELQELSDAREAGMAFILGHSHVKAKSGSSFLRRFVINFCYDFLRRNSRGPNYAVSIPHASTLEVGMMYYI

SEQ ID NO: 3216 - protein, 482 aa, Zea mays
MALTRIGLAGLAVMGQNLALNIAEKGFPISVYNRTTSKVDETVQRAKAEGNLPVYGFHDPASFVKSIQKPRVVIMLVKAGAPVDQTIATLAAHLEQGDCIIDGGNEWYENTERREKAMEERGLLYLGMGVSGGEEGARNGPSLMPGGSFEAYKYVEDIVLKVAAQVPDSGPCVTYIGKGGSGNFVKMVHNGIEYGDMQLISEAYDVLKSVGKLTNSELHQVFSEWNKGELLSFLIEITADIFGIKDEHGDGYLVDKVLDKTGMKGTGKWTVQQAAELSVAAPTIEASLDSRFLSGLKDERVEASKIFQGDYYSTGSPVDKAQLVEDVRQALYASKICSYAQGMNIIKAKSAEKGWGLNLGELARIWKGGCIIRAIFLDRIKKAYDRNPGLASLLVDPEFAQEIMDRQAAWRRVVCLAINNGVSTPGMSASLAYFDSYRRDRLPANLVQAQRDYFGAHTYERVDMPGSFHTEWFKIARNISNN

SEQ ID NO: 3217 - protein, 554 aa, Zea mays
MASTCLAPASLSTPLLSDSIARAPAANGHATNHRHHHHDDSDGAAAVSVCDDGGGDPFAFLSEDRPPRDRGPSPADPFRNGTPAWGGGVYAWSRTLLLLPVALVRLALFGLSIAIGYAATWVALRGWADTHGRPRVGGGPMPAWRRRLMWITRISARCILFSFGYHWIRKKGRPARRELAPIVVSNHISYIEPIFFFYELFPTIVSSESHDALPFVGTIIRAMQVIYVDRFSPASRKAAVNEIKRKAACNSFPRVLLFPEGTTTNGRFLISFQHGAFIPGYPVQPVVVRYPHVHFDQSWGNISLLKLMFKMFTQFHNFMEVEYLPVVYPPEIKQENALHFAEDTSYAMARALNVLPTSYSYGDSMIMARAIEAGKVNGSNYMVEMAWVKDIYGVSTAEAMDLLEHFLAMNPDNDGRVKAQDFWAHFGLDCSPLCKKIFHYFDLGIKESITFRQFLVGCAHLRKQPLFQGACETAFEKCRDPETSEISRAQLADVLRLSMLLPSGDRMLDLFKTFDIDGDEKISKDDFMTCLGRFPFLIAFFAAPINGEVYIEIV

SEQ ID NO: 3218 - protein, 488 aa, Zea mays
MAVVDAMALSTPTPARAEQPDITRCHRGGEVREGDLVQFNYVCRRANDYFVHRCVVEFPDAIALLFDACTGDACYTAPDFESDRVQIHQMCQGAQMVQGYCVRLMVGKLFVVENAAVGSEVEQEEPKKEAMAGVGETLCSFMEGFGDQGEDSIILSPRLKEISTPDRPAALRFLGERFSEIFGSPYYMAPEVLKRNYGPKVDVWSAGVILYILLCGVPPFWAETEQGVAQAIIRFVIDFKRDPWPRVSDNAKDLVRGMLNPDQKRRLTAHQVLGHPWLQNIKKAPNVNLGETVKARLKQFSVMNKFKKHALRVIAEHLWVEEAADIKDMFEKMDLNKDQMLSFEELKLGLHKFGQQMPDADVQTLMEAADADGNGSLNYGEFVTLFVHLRKIGNDEHMHKAFAYFDRNQSDYIEIDELRESLADDLGQNREEIINAIIRDVDTDKDGKISYDEFATMMKAGTYERKASRQYSRKHPDSTRESCKNRVF

SEQ ID NO: 3219 - protein, 1022 aa, Zea mays
MAWWSGKVSLSGLQDIAGAVNKISESVKNIEKNFDSALGLEEKRDDEEASGSRTSNSDGIGFFNPVMAFMGHNGEEDGTEVSEKPQFPKDLSVEEENHSTPTKKQTSEVDHSEVSVTTFPEQPSKSEEAHSISNESPVSKADVSEQSITPQTPAHPSVAEEKLDGCTEALASKVGDDEASETSQSPGHPSTVEENQDHQYSKHSCPSDEAEPNQLRESAGDLPDGSAFSSPIKIDKSGDTETGESIDTGKEDTSDGNASQSQPAESMLASSDNITEVEDKIAQEYNVPKELSSPQENCDTVDKVTRLEVKLHDGNIDTKKSEEESNKMEAGEVSVVVQEDNVMEQPEDLMSKSITAAHDSHSQNESVVSLTDVPAGLGGVGPADNFTEEEKIARITDFQIVDSVVSVGELEKLRREMKMMEAALQGAARQSQSKADEIARLMNENEQLKSTIDDLKSKSSEAEMDALKDEYHQRVATLERKVYALTKERDTLRREQNKKSDAAALLKEKDEIINQVMAEGEELSKKQAAQEATIRKLRAQIREFEEEKQRLNSKIQVEEAKVESIKRDKMATEKLLQETIERNQTELAAQKEFYTNALNAAKEAEALAEARVNSEAKVELENLLREAGEKENMLIKTIEELRLSLTRQEQEAAFREERLKRDYDDLQKRYQASELRYNELVTQVPESTRPLLRQIEAMQETSAQREEAWAGVERTLNSRLQEAEAKAAASEEKERSVNERLSQSLSRITVLETQITILRTEQTQLSRSLEKERQRASESRQEYLAIKEEAAMQEGRAKQLEEEIKDLRVKHKEELQEAAEHRELLEKDLEREKAARAEIEKTSSREAPKVPLPDQTRNAPLRKLPSSGSINSLEESHFLQASLDLSDNASLERRMSSESNMSYYLRTMTPSAFESALRQKDGELASYMSRLASLESIRNSLAEELVKLTEQCEKLRTEAAAVPGLRAELEALKQRHFQALELMGERDEELEELRNDIVDLKEMYREQVDLLVSQLQALGARV

SEQ ID NO: 3220 - protein, 988 aa, Zea mays
MLQMLGFRGGSPSTGDASPAISGDGGAAARPLRLVYCDDKGKFVMDPEAVAALQLVKGPVGVVSVCGRARQGKSFILNQLLGRSGGFQVASTHRPCTKGLWMWSAPLKRTGLDGTEYSLVLLDTEGIDAYDQTGTYSIQIFSLAVLLSSMFIYNQMGGIDESALDRLSLVTEMTKHIRVRASGGSCTSSYKPSNINLRPCYASDTFGVRRADDTVLPLLQDFYLDLAEDNRKITPRDYLELALRPVQGGGRDISAKNAIRDSIRALFPDRECFTLVRPVNNEKDLQRLDQLPIALETYLHFKQFDGIYKLCLSLHDLSNFRPEFRSGLDAFTKFVLDRTRPKQLGATTMTGPILAGLTQSFLDAINNGAVPTISSSWQSVEEAECQRAFDSAVGTYNSSFDHKKHIEEDSLREAHEDAMRKAISAFNVSAVGAGRQLEHIDAERNALRLKCNSSDDKLALLRKQLEASESHRAEYVRRYEEVLNDKQKISKDYSIRITELQAKSSKLEQRCLSLSSSLETAKRESNDWKSKYDHGILQQKADESKLKSQIASLESRVSISEGRLSATREQADSAQEEASEWKRKYEVAVSEAKTALQRAAVAQERTNKKVQEREDALRVELANQLSEKEEEIARLHAKRSQMEIHATSLISRLEATEAKSKSHESDSLALREEIRLLTDNLESIRSEALSREKEVGILEQEKNHLEEKYLSQCKKFDETDIRCKEAEREAKRATELADVARVEASAAQKDKGEAQRLAMERFALIERMERQVEALERDKAKLVEEIERLHQSEKDAVSKVALLERNVGEREKEIDEMLKQNNQQRSSTVQVLESLLATEREARAEANKRAEELSLMLQATQGKLDMLQQETTLDSKLKTSARRLRGDATESVHDMDIDGDNGRRRKRSKSTTSPFKNNHTEDGGSVFIGEDTYNGSQQGTESEDYTKFTVLKLKQELTKHGFGAQLLQLKNPNKKDIVALYEKHVIGK

SEQ ID NO: 3221 - protein, 510 aa, Zea mays
MASADLAEAMEPGKKSNVKYASVCAIMASMACVILGYDIGVMSGAAIYIKKDLKITDVQLEILIGIISLYSLIGSFAGARTSDRIGRRLTVVFAAVIFFVGALLMGFSVNYGMLMVGRFVAGVGVGYGGMIAPVYTAEISPAASRGFLTSFPEVFINLGILLGYLSNYAFAGLPLHLGWRVMLGIGAAPSALLALLVFCMPESPRWLVMKGRLADARAVLEKTSASPEEAAERLADIKVAAGIPKDLDGDVVTVPKERNSGEMQVWKDLILSPTPAIRRILLSAVGLHFFQQASGCDSVVLYSPSVFRSAGITGDNKLLGVTCAVGVTKTLFILVATFLLDRVGRRPLLLTSTGGMVISLISLGTALTVVGHHPDAKIPSVVALCIASTLAFVAFFSIGLGPITGVYNSEIFPLQLRALGFAVGVACNRVTSAVISMTFLSLSKAITIGGSFFLYSGIAAVGWVFFFTCLPETRGRTLEEMGKLFGMPDTDMAEADDTAAKEKVVEMSTK

SEQ ID NO: 3222 - protein, 427 aa, Zea mays
MVILYPGCVAPTVHRDFLPRWVLLNNSSRMYCHVFPDRTKPKRQYRHQWVPCFSKGSSFQDPLPSVKPSRLLPAEELKTYPNTVPEEIFNTIILDDSDAFYVLELSTSREFSSSLDKNSAILICLFDVDGDSLLQRVPAIYLGQPTHGFKTEQQIPFQSGSVDIVTFKGSKLKTIKEVWIGLESGSWRLDGLSLKVIHGPVGQPKEINGTPEQKFSGLQYTFENVNVFLGDDGASVAEARPTAITDLSGVGLSDLQQGMLSSRSKASSIQEVREDGLREYADLKQSLLLYDASIVITGFSTFILASNDSAAYSFLIGGIGGFLYLLLLQRSVDGLPVIGSPSEAGGAQPSVKSFSGVRRPWLILSLVLVAGAVALKYGAGGDSFALTPTDLFVGTAGFLANKVAVLLAAFMPMLSDSKSEDGSGDSS

SEQ ID NO: 3223 - protein, 64 aa, Zea mays
MRLDQPYRSTTRVPPSPPTARRLVATALTCGAVLGFGSGSDRIGSPEGHARFFSFTLRSIRVVY

SEQ ID NO: 3224 - protein, 237 aa, Zea mays
MATAGGGAGHLKLLGAWPSPFVNRVRMALHLKGLEYENVEEDLTNKSDLLLASNPVHKLVPVLLHGDKPISESLVIVEYLDDAFPGAGQAVLPADPYERAVARFWAKYVDGKLHGMMVKALMGATEEERATATVDALAAMDTLEGAFAECSGGKKFFAGDAPGYLDVALGGFIGWLRAWDKVGGVKLLDAGRVPRLATWAERFAALDVAKEVIPDPDHIAEFAKVLQARSAAAATSN

SEQ ID NO: 3225 - protein, 412 aa, Zea mays
MADTGRDAFPDEAEPAFTLDEYMEDIEAVELEADLVLGGDEGKECTYAGGYLKRQAVFSCLTCVPDGVAGVCTACSLACHDGHEIVELWTKRKFRCDCGNSKFGGHLCKLCPEKDYENSANTYNHNFKGSYCTCGRPYPDPEAKEQVEMIQCSICEDWFHGDHIGLNSIEEIPRDEEGEPLYEELICHKCSSVCHFLKLYPDTIWASGKPNLAVETDASDSNVMKKPSGHADPEKHENGALVDNTVGEKTSVENDSTKAIAVPEEANLGSSSGNNCKLGVDVNTMPAITDKSEPFFMSKGWRETLCRCETCFNFYAQRGIAYLIDKEDSIEEYEKIAKQKREMKLEQQQGAETNFLNSLNHVQKIEMISGINDMKNEFQSFLESFDASKPVTSDDIHSFFENLAKKKKQRLS

SEQ ID NO: 3226 - protein, 428 aa, Zea mays
MSSEQCTVLMESNAAAQDLEGRRLAVLLCWLFGNGCVLAWNSMLTIEDYYAFLFNSYHPTRVLTLVYQPFAVGTALVLAHRGARINTRARNLAGYTLFFLSSLALILLDAATSGRGGMAAFAGVCVVSAAFGVADAHVQGGMVGDLSLMCPEFVQSFLAGFGASGALTSALRFTTKAAFESTRGGFRKGAMLFLAVSCIFELLCVLAYAFVFPRLPIVKHYRARAASEGSLTVAADLAAAGITGPAGPGSGQGHTARLSNKELLLQNKDLAADVFLIYVLTLSVFPGFLSEDTGSHGLGSWYVLVLIAAYNTGDLVGRCLPLARRLRLACRARITAAAAARFLLVPAFYLAGRWGGGQGYTILLTAVLGLSNGYLSTSPCASSRRRPEDTRAPSRTRWGTCSSPASSPAFPPASRSTGCGSSARAGDW

SEQ ID NO: 3227 - protein, 431 aa, Zea mays
MAGSSSYSVLPDQTMDNDDAQIGVAKTQGKYWGIFICWLLGNGCLFGFNGMLTIEDYYVYLFPKYHPTRIITLTYQPFVLATTAIFTYHEAKVNTRVRNLAGYTLFFLSSFGVIILDVLSSGSGGIAPFVGICTIAAAFGIADGHVQGGMTGDLSLMCPEFVQSFFGGVAASGAITAALRFFTKAVFENSRDGLRKGAMLFSSISCFFELLCVLLYALVFPKLPIVKFYRSKAASEGSQTVTADLAAGGIKSLPNPLAEEDGVVERLNNKQLLHENMDYALDMFLVYVLTLSIFPGFLAEDTGSHSLGSWYVLVLIASFNVSDLIGRYLPLVEQMKLTSRTGLLTAAISRFLLVPAFYFTAKYGDQGWMIMLTSLLGLSNGHLTVSVLTEAPKGYKGPEQNALGNLLVLFLLAGIFVGAVSDWLWLIGKGW

SEQ ID NO: 3228 - protein, 303 aa, Zea mays
MATTTTAGRNNGEGEQKRWREKGGFKTMPFILGNDICDRFATAGFGANMITYLTQQLHLPLVEASNLLTNFGGTSSLTPILGALAADSFAGRFGTIVAGSVFYQLGMLGLVVSALLPSLRPAPCPGAPAACQRASGWQLAALYLSLLCTSVGSGGLRPCVVAFGTDQFDREPGEQQVTAEAAGEVAERKRRYFNLYFFTMGVAALLALTVVVYIQDNVGWGWGFGIPAVAMFVSIVVFVVGYPLYVRLKPGGSPFTRLAQVAAAAFKKRHVAVPEDAGMLYQDKELDAFISTNGRLLHTDQLT

SEQ ID NO: 3229 - protein, 538 aa, Zea mays
MENHTSHSPTLPLRFTQSHTPADQPGARWHCGSAHTAMRKDAAAAGIAPGSAPAFLCFDLKPFLAALTVLTLLAAAWQLRPYQSLLASPFSAACPQPTAGVSLPRALAVHAKKASSATNSTVSSSPSPPPGPERREFHAVGSAAALFVQMGAYRGGPYTFAVVGLASKPTHVYGKPWFRCEWEPSDASSPPMRAAKTYHMLPDWGYGRVYTVVVVNCTFPRVPNADSAGGRLVLYAHYGPSRSPASRRERIVALEESPGAYDEAAFRTTPPHRYDYLYCGSSLYGNLSAARVREWMAYHARFFGARSHFVFHDAGGVGPAVRAALEPWVRAGRATLQDVRAQAEYDGWYHNQFLVVNDCLHRYRHAAKWTFFFDVDEYMFLPDGRALEDVLAELEPYTQFTIEQNPMSSKLCVDDPAADYSNQWGFEKLVFRNSITGVRRDRKYAIQAKNAYATGVHMSENVIGNTTHKTEHLIRYYHYHNTINVLGEVCREFVSVPPKKGGGLTWSEKTPWYYDGSMKRVAGAVREFERETIGDVRL

SEQ ID NO: 3230 - protein, 480 aa, Zea mays
MEPANRGTACPLRSEMSMESVAVAVVAVPFPAQGHLNGMLHLSLLLASRGLSVHYAAPGPHVRQARARVHGWGDDAHRRIEFHELEVPAYATPPPDPVAPSPFPTHLIPMSEAFLAGARAPVASLIGRVSARHRRVVVLYDRLSSFAAPEAARIPNGEAFCLQCVAACFDAAWTDAGQRLLRKHGLDAPHPGACMPREFVEYIVRTQEDSRSPAFAGVVANTCRAIESEFIDVVAGDPENRGKRVFAVGPMNPLLNVTAPTAGQSARHECLDWLDKQPPASVLYVSFGTTSSLRAEQIAELAAALRDSKQRFVWVLRDADRGVVHEEEAVESRHARFLSEFTEETQGIGLVITGWAPQLEILAHGATAAFMSHCGWNSTMESLSHGKPMLAWPMHSDQPLVAELVCKCLKAGLLVRPWEQHSAVTPAETIREVIEKVMARDEGLAVRERAKELMEFIRRSVAEGGSSRKDLDDFVAYIAR

SEQ ID NO: 3231 - protein, 374 aa, Zea mays
MKRQWSHPSVVLPLLAAVFLLLTFRCSLRHAQQQASSLRADDAGTSTSYAVDATLAELAAVDPAASAVLRAAEALLEANLTRAPPERRNAAVRGLRDWLGKQRFEPQVMAELVDLIKRPMDRYAAGARGGDGDGDAPRPYASCAVVGNSGVLLAREHGALIDAHDLVIRLNNAPAGDGRYARHVGTKTGLAFVNSNVLSRCAARATPGCRRCRTYGDRVPILTYMCSAAHFVEHAVCAGGGGGPDAAAPVIVTDPRLDALCARLVKYYSLRRFVRDTGRPAEEWGTRHEEAMFHYSSGMQAVVAAAGVCARVSVFGFGKAPGARHHYHTLQRGELDLHDYEAEYEFYRDLQERPGAIPFLRDSGFRLPPVVVYR

SEQ ID NO: 3232 - protein, 653 aa, Zea mays
MASAAAVIASPAPGAAAAEPAAWLVDERDGFITWLRGEFAAANAIVDHLIFHLRSISEPGEYDHVFSLVQQRRHHWPHVIHMQQFFPVSDIAFALQQASWRRHAPPAQALGAGASPAALPPPPPRRASFSQSHHSHQHHRHGAHYRPDPARGAATAATGSEKDGREVHNNKEGRGLKEAGNVVDTKSLRLDSPITDEGEEKSKLQAVSEESSKMVATPVEYSTNEIIDGSMVNTVEGLKVYEGLLNVTEANKILSLVNETRASYRRGGLEARQKVIIAKRPMKGHGREIVQLGVPIIDGPPDDENLRETRVEAIPGLLNDLFDRLSQQEIIPFKPDYCVIDIFNEGDYSHPHQSPSWYGRPLCTLCLTDCDMVFGRYISGEKGDHRGPLKLSLATGSLLLMQGRSIDCAKRAIPATRKQRVILNFGKSVARKHIPAESAWSTPLTPPMPWGQSSRPVNGSRHPQSPKHYGYAPISGVLPAPPVGAHHVPPSDGMQPLFVAPAPISAAAIPFTPTVPLQNTSAAWIQEVTPRPAPPRFPGPGTGVFLPPGSGHPLPHQMMPASHGHGEPNSPQGSSAYLHSKVNGKETSNGNLSPKNSPRKTSCTAEEKPECNGSLNGGGGSADEKSTVGMEQQNGVQKNVGSSKVQPHGHATE

SEQ ID NO: 3233 - protein, 396 aa, Zea mays
MEDFGGWNMQYAAELCLPSRRDDDDDGLLGDFLGGGGLDIRSDHGGLNLPSSHPAVQNLVPCHGGVSLSVSDAFMGLDTADMLASVTGALDCSLLDTFACGSDAVVVAEEPAAQPTASSNAFSGYSSTTGGNYGNISSGESNTYGGSGGGHDTEVASPTCASKRKLAGKYPAIAAASATATTKTAEGQVAAPRRGTKRDSATSSSSTSATVAGHGGGNHAAGGGGSSSVGDGNGYEPDSEAIAQVKEMIYRAAAMRPVHQLVCGAAGGEPPSSSQNKPRRRNVRISSDPQTVAARLRRERVSERLRVLQRLVPGGSRMDTASMLDEAAGYLKFLKSQVKALERANPSSNGGYNDSSFLPQSYTGCLGVDGGTSAAFGSDGAIGGYGYVKPGRNMHR

SEQ ID NO: 3234 - protein, 434 aa, Zea mays
MCLIRLAQLRRHRPDAPALTAHKPRAAAAASCPGRILRAARAALIFPAPTRRTTRALAMSKKVGRAKKAAGGGELSRFLESHLQTISDTFQMMAESAPGALERTEWSEVVKLGDQVSRQATVAGMLWSGDLPDVETLKENIVAYFNILQGFLLVCHGSMVGAGPTLHKSIFGSAKDVVDSSFSLFKHAVSAYESRSSDRNTTIPQVTGTVWEACAALKKVPASNCIAIGRAMTRIGVCLKDVLREMNELPIGGSGDSTAEKSSNGVVDTTSCSDRDERSDLDLDDDDDDEFTEEEVAVAKLVINVVSDSLVVVKEAIRFITGLLRSSGNKDKDGANEDRVEPMEKLLSHCKEIADQVNDLGASVYPPQDSSEMELAIKRLYNGINGMRKEIGNLGGAPESTFAALEGFENCLGSLRARLADDVVNEMEGLNISH

SEQ ID NO: 3235 - protein, 295 aa, Zea mays
MPPPLLQARDYMGAGATPLSCSSSGEGTGPHLALRLGLPGSDSPGRDAGPEPDHAHVDAALTLGPAPAPAPAPPRVGAKRGFADSRDRCAKRDATAADDAAGGVTGEEKRVGAAAAGAPPAAKAQVVGWPPVRSYRKNTLAMSATKTNGEDEGRSEAGCCYVKVSMDGAPYLRKVDLKTFSSYEDLSLALEKMFTCFITGQSGSCKTSRRERLTDGSRADALQDQEYVLTYEDKDADWMLVGDLPWDLFTTICGKLRIMRGSDAAGMVSNLPAAPRSPEQIVGTRIRNVARHAES

SEQ ID NO: 3236 - protein, 91 aa, Zea mays
MAYFAPPSPLGPPLLGRVPRKSVAAVLRVHRVTSLRDRQLSTPCSTVPVPSVHRAERAVVAGDEGAAREARRGMLNTSGAEVVVGTDELWR

SEQ ID NO: 3237 - protein, 473 aa, Zea mays
MDASSSLSLLALVTMLSLLHSATTDAAAGLPAARTSHRRLLLLHQQDTNLAALPPPARVHVVPVDVHVPSHGTGSFPAASPGPHGGKNGPSEAAPATPATAAAYLSRSMRWLYMVAVPAVALLALAGLACWLLCRKSAVATIGPWKTGLSGQLQKAFVTGVPKLQRSELERACEDFSNIVVSYPHYTVYKGTLSTGVEIAVVSTMITSSKEWTEHSESCFRRKVDALSRINHKNFVNLLGFCEEEEPFTRMMVLEYAPNGTLHESLHAEDFERIAWRGRMRIVMGLAYCVQHMHELSPPVAHPDMQSSSVLLSEDGAAKIADMSVWHEVISQGKTTTNGDEQASSAGLLAGNVYSFGALLLEIISGKLPTPYPAHERSLQMTSALVERVTNDDRSVASLLDPTLGGDHREDELAVIGEVIRACMQSDPRRRPSMREVAARLREAVGISPVAATPRLSPLWWAELEVLSAAEAS

SEQ ID NO: 3238 - protein, 477 aa, Zea mays
MASSNRHWPSMYRSSLACNFQQPQPQPDMNNGGKSSLMSSRCEENGGRNPEPRPRWNPRPEQIRILEGIFNSGMVNPPRDEIRRIRLQLQEYGPVGDANVFYWFQNRKSRTKHKLRAAGQLQPSGSGRSALQARACAPAPVTPPRNLQLAAAAPVAPPTSSSSSSSDRSSGSSSSKSVTVTPTTAVALASPAGAAPAAVFRQQGVMPTTAMDLLTPLPSSSAALAARQLYYQYHSQIMAPAAPPMPDTLGGVLDGHSHHTHEPPAAIHRPVSLSPSVLFGLCNEALRQDYCADISVVPTKGLGHGHQFWNSTTCGSDMGNSNSKIDAVSAVIRDDEKSRLGLLHYYGLAGATTTAAAAVAPAPLAADAAAGTATLLPSSAASDQLQGLLDAAGLLMGETPPTPTATVVAVARDAVTCAATATAQFSVPASMRLDVRLAFGEAALLARHTGEAVPVDESGVTVEPLQQDTLYYVLMVT

SEQ ID NO: 3239 - protein, 109 aa, Zea mays
MTRVLARVTPHKFYRSAPPTSWARDATPVAHHFEHALVCDPTGRRRPRSPQRPARRPRTLHAASTGMSLDVQGAAPLNTLPATLPFSLCSSFLLSRLREYIVSVYSLVF

SEQ ID NO: 3240 - protein, 675 aa, Zea mays
MVAGRVKAAMGFQRSPATPKPGASSSSSSSRKAPPPLQLPGSAALPETPRRRSSGSPAPPGSGSKGGGGPFSRYFPRSSAQVQPARASGQPEPPPPPPPPPSCPGPAAAADLARLVEELRERESRLRTELLEHKILKETVAIVPFLETELAAKSSDLGRCRDALSRLEAENASLRAELHAARGSQQRVVQLEKELAEVKRHRRRDSGPDADRHDDDCSSSVSSHNSDSDRSNAPTNAVVPGLLIVPPPAPPPPPPPPPPPSYKSRSYFSASSRASPANSSSSSSTSSAPSTPTYSSDTAASRNRVPELSQLPPIPAPPPPPPPPPPPAMPARGRRSACSSPSTSSGSSGGGCGRGSGPPAPPPPPPPAARRSSRASSPAASGTAPAPAPCVRRVPEVVEFYHSLMRRDSRSRDAAAAAEAGASGGAAAARDMIGEIENRSSHLLAIKSDVERQGDFIRFLIKEVQGAAFVDIEDVVTFVKWLDVELSRLVDERAVLKHFDWPEGKADALREAAFGYRDLKKVESEASSFCDDPRQPCSSALKKMQAVFENRLEHGVYSLVRVRDGAMSRYRGYQIPWEWMQDTGIVSQIKLQSVKLAMKYLRRVSSEIQAIQVGPDEEELVLQGVRFAFRVHQFAGGFDVDTMRAFQELKETASAFQQWGGQNQHLHQQRLAGRS

SEQ ID NO: 3241 - protein, 936 aa, Zea mays
MLVRLGFVVVASVAALTLQRANSGARHSKDYVQARKRKDKANNSEHGEKEEEKEEVKTISGIINSARSLGDDDDDMLSEIESLLSGDIDIPIPSDRFDVNGRSRYNNAYMANEASEIEKLRSLVREMEEREAKLEGELLEYYGMKEMETDIAELQKQLKIKTAEINMLNDTINSLQAERKKLQDDVACGEVANKELEAARGKIKELQRQIQLEAGQTKGQLMLLKQQVIGLKAKEEEAGKKEAEVQRKLKKLRELEVEVLELRRKNKELLYEKRDLIVKLDAAEGKITESDVVANAREEINKLRHTNEDLTKQVEGLQMNRFSEVEELVYLRWVNACLRFELRNYQTPSGKVSARDLNRTLSPKSQERAKQLMLEYAGSERGQGDTDLESVVSSMPSSPGSEDFDNMSIDSSSSRYSFLSKRSNLMQKFKRWGRSKDDSSSLASSISGSPRRKPKGPLEALMLKNAGDGTAITTYGKRDPNDVLDDENVASSFQLMSKTVEGFADEKYPAYKDRHKLATEREKAIKEKAGQARAQRFGGGHSSALISSPKGALPPKLAQIKERSPAANAESSEQSSDNQNNTLVVSQMKLANVEKRATRVPRPPPPRSTAASGATSIASGVQTPRAPGAPPPPPPPPGKVGGPPPPPPPPGALPRNLGGGDKVHRAPEIVEFYQSLMKREAKRETSLGSISSNVSDARSNMIGEIENRSTFLLAVKADVETQGEFVESLANEVRAASFINIDDVVAFVNWLDEELSFLVDERAVLKHFDWPESKTDAIREAAFEYQDLIKLQNRVSTFTDDPQLACEEALKKMYSLLEKVEQSVYALLRTRDMTVSRYKEYGIPFDWLSDSGVVGKIKVASVQLANKYMKRVASELDALEGTEKEPNREFLLLQGVRFAFRVHQFAGGFDAESMKAFEELRSKMTTQASAPPISQG

SEQ ID NO: 3242 - protein, 335 aa, Zea mays
MGEQSLSQPKPQPLSPFPSPPASAALPPPASASASASASAASTSRTTSAAASRPKKKVTNPSPDRNPAKKPRLTFSIPGRPLSAVGEVGVAIRYLRAADPALAAVIDAHEPPVFQCPHRPFHSLVRSILYQQLAFKAAASVYSRFLALLGGESCVAPDAVLALTPHQLRQIGVSPRKASYLHDLARKYASGILSDAAIVNMDDRSLAAMLTMVKGIGSWSVHMFMIFSLARPDVLPSADLGVRKGVQMLYALEDVPRPSQMDKLCERWRPYRSVGAWYMWRLIESKVPQPAPAIPVGSLAFPSPDGQSMLQQQEQQQQQTVIQMIDPLQMLPGMG

SEQ ID NO: 3243 - protein, 159 aa, Zea mays
MAARGLGWAMHCTETRGKSGPAFAKRESSFHFCAGIRDATDAVFMAEDEESVRIGIGEGMVLLVRPAPRFFHHQQQAAGSRQQDAGRPTSQANYPAVGRLSCRRRSINGQREHLPACLLVACAFHDKQLAEFFGKQIGVLEHDQDVLLSLHVSTSPCMF

SEQ ID NO: 3244 - protein, 426 aa, Zea mays
MAKYGEGDKRWIVEERADGTNVHNWHWAERDCLEWSRARLSSLLAGLTILDGEGGLSLRTVALDKLDGEAYVNIRKGKVIPGYELSLTLSWEAEAASESGAAKVTGTAEVPYLADENADEDPDLRVTVRGDETPLALRAKDAFLSRGKPMVLEKIREFVAAMAKGGPAKDELDSKKTPTKVAGSAPAKEAVLAPAPAVEKKKAKGKDKEGFKTIEMTEKFYCRSKDIYEILMDENRWKGFTQSNARISREVGGEFSLFDGSITGVNEELQEGKLIAQKWRFGSWPDGLYSSVRLVFDEPESGVTIIKLKQTDVPEEDKYVDIPMLRTPNLLMLVSCTYDLFAFEYLQVWKFNCGREHRERLERTHIPADTRSVRFWDLKNLKRRFGMKLDFKFLRGQTMHVIAIHVLFTHLFSMSLNTEHCISWGV

SEQ ID NO: 3245 - protein, 741 aa, Zea mays
MASSSPVHTQLIQALELQTRALLSELDKRLDSKWGTKWESRVGAIESRSADSTRAMSDFSSALHSDVEAHLTAADAATDSNLLQIEAELDPRVSALKSSVHALDLWCPRVDSSIEGLHASVDFISTEVSKMGILWNHDVCVDDLARPGLFGAHRSAACFDASASAPSIPASVIADNWGGFFDDGEQYCAALDALPNSIHSDLLNTFARHSHDHLFVLNPVAAQDSSAEEAMATMEAAADAGDPARLVQSSPSPSLLIAGNLLPPSLTMPQLQAEVVDKQYRVAMSPPPPLPVVDELYREEASPPPPIHDDAAGVMSLDSSAFKVLDQMSKSARADGLVVNPFEELESGSMALLAEATGEKVIVVGSVLLCRSPSLYPQSMSCDTRRCMAWLDAKAPKSVVYVSFGSAKCMPPIQLRQLGMAFASCPSPVLWLIKDADSLPNNIKDLLHEHTVADDVAGSKCLVVRGWALHVAILAHPASDGFMALCGWGSTLEVVAAGLPMAAWPFFAEQFINEQLIMDVLGIGLSVAVMKPIENVLIASNMGGAVVMIYAPVFWSCLTSFTLGIHGQIVGVLCLPFLVIQLNISIAVQQRFLWDPGGDQCCLLNLFIHGLGDLQMQQASLSFVTKTGWLVIILSLLLLQWDKPNLRGLNKSKCIQRGFRRCYVHACPSRWSDWLPSAEFWYNSSFHSATGRSPFEDLYGYAPRHFCITSCDGPSAGLNAFLQDKLVMTKLLQQHLLRAKQ

SEQ ID NO: 3246 - protein, 618 aa, Zea mays
MSSFFAVAVALVLSSLIHGTTMATASSEESFFQKCPASRCSEGGPEIRFPFRLATSPLSCGAPGMELVCSKADTVLVHPNLGLCKVTAIWYGGSTITIVPLAVAAEPKCPFQKIISTNLSTDVYRPYGDRATLVSCSAEFIVPSHPASLAGPISCLTNASRRFAYLVPSFRPMDFLPLDCTVLSNSISVPYPASVNAGFNGTARGAIAFGETMLEWRVPNITDVCRDCEAEGRLCGFSSESRQAFCKSKNHSSRLKVIAVTTPVAAVLVLSAMAGAALLHLALKSKYDDEIHRKVEMFLETYRTLKPRRYTFSEVRKMTRRFSSRLGQGGFGSVYKGELPNGGVPVPVAVKMLEDSTGEEEFISEVATIGTIHHANVVRLLGFCSERSRRALVYEFMPNASLEKYIRCSSQEQSLIPTASKMLEIATGIARGIEYLHQGCDQRILHFDIKPSNILLDYNLNPKISDFGLAKLCARDQSVVALTAARGTMGYIAPELYSRNFGTVSCKSDVYSFGMVVLEMVVVSAKRRKYSPAETEDQNDDVCVPEWIYEEIVTGQEPREMARGERDMVRKLAIVALWCIQWNPPNRPSMTTVVNMLTDSLQSLKIPPKPFVSSFVGQ

SEQ ID NO: 3247 - protein, 973 aa, Zea mays
MHRAFEEISDEEWSNHTFEPSRVLKRPNQRPSQPPPSIDSFIYNPKACSAAGTSTATVVLSDDDSDFDLGADGGSRRAAKSQRVLKRPHNGAPSRPSLPVKSSRRNPQPSNAAAAFGFSDSEDDDFDLPTSPLRTSSLRRKGKNQRPLKAPQLKPHLRAPPPPNSSSHNPKRSKFASDVKLSNSEDDDFDLTKTLSLNSSTNRQHIQKRPQHKPRLQHRQSFGSSCGNQKHSKAVATTRLSDSDDDDFNITDNDFDLPASHSRISRPRRTTSCRRLTSFAIDISEEDEEDLADDDFDYQDPRPPQQRSSGRRFVVGDDDDSDVPVALEEEDGVNWSELEKEDVDEDYNGVRSVHVEEPEGDVVGMALHKCSRISSDLRKELFGSSAQNCESYCEIDASTCGIVTQEDVNAACTREKSGFEPVLKPYQLVGVNFLLLLHRKSIGGAILADEMGLGKTVQAVTYLNLLQHLYNDPGPHLIVCPASVLENWERELRKWCPSFSIIMFHGAARTTYSKELSSLGKAGCPAPFNVLLVGYSLFERRSAQQKDDRRALKRWRWSCVLMDEAHVLKDKGSFRWRNLMAVAQHARQRLMLTGTPLQNDLHELWSLLEFMMPDIFATGDVDLKKLLNAEDRELISQIKSILGPFILRRLKSDVMQQLVPKIQHVKFVVMGTEQSEAYKNAINEYRAACQARSAKSSDGISNNVAGLIPKRQISNYFTQFRKIANHPLLIRCIYGDKDVDRIARLLYPKGAFGFECSLERAIQELKNYSDFNIHQLLLSYGDVGTKGALKDEHVFASAKCQALGELLPSLANDGHRVLIFSQWTTMLDILEWALEIIGVTYRRLDGGTAVTERQTIVDTFNNDLSIFACLLSTRAGGQGLNLVGADTVIIHDMDFNPQMDRQAEDRCHRIGQQKPVTIYRLVTKDSVDENIYEIARRKLVLDAAILHSGAELDNSTDVPEKTMGEILASLLLV

SEQ ID NO: 3248 - protein, 569 aa, Zea mays
MALYLLFESASGYGLFHAYGIDEIGQSVEAVRSSVLDLDRFGKAVKLTAFNPFSSAVDALNQCNAISEGIMTDELRSFLELNLPKPKEGKKAKYSLGVVEPKVGSHISEVTGIPCQSNEFVQELLRGVRLHFDRFINELKDSDLEKAQLGLGHSYSRAKVKFNVNRVDNMVIQAIFLLDTLDKDINSFSMRVREWFSWHFPELVKIVNDNYLYAKLAKFIVNKSDLAEKDIPALADIVGDEDKAKEIVEAAKASMGQDLSPVDLINVQQFAQRVMNLSEYRKNLYEYLVTKMNDIAPNLTSLIGEVVGARLISHAGSLSNLAKCAASTLQILGAEKALFRALKTRGNTPKYGLIFHSSFIGRASTKNKGRMARYLANKCSIASRIDCYSEASTSVFGQKLREQVEERLEFYDKGVAPRKNLDVMKAAIDSMVNDTLMDDDGKADNEKADTSAKKSKKKKTKTETDGDAMDVDKPSNVADGEAELGTEKKKKKKKHKLEEAQEENGAAHANGDAEETQTPKKKKKKSREISEEAEPKTATEGKKKKNEEAEPKTATEGKKKKKKAVKADE

SEQ ID NO: 3249 - protein, 186 aa, Zea mays
METLLISEERNHQLHHFSGRRKKALAASPQSTRSYHAGNCRAFHSGITVGILPSPPAQRVALTRSSPEPKTPKHQLHHGKKRSRAISINLSTSPPSRPELWAGPGFCNSPPPSSLPIPKFSLHQKRSVSLEFPPADRSDDEEVPVHAKSAPSSPTAGSGVTFFSGTDATIATENLRRILNLKIEDN

SEQ ID NO: 3250 - protein, 410 aa, Zea mays
MAASTAAVVRRLCVAAEVRSALAVLARGTKSGDAALDVAACTALVHVCCQSGDVAEARRVFDVMPRLGVAPNEVTYTALINGYFVRGHREMGFALFAEMRRDGVEPNLYTYNCLIGEWCRTGEFKSARLLFDEMPVKGVVHNVVSYNILIAGLCRHSKLKDAVQLFEAMRREGIRPSIVTFNLLIDGYGKAGKMANALHFFNQMKAAGLPPSVVTYNELICGFCRVRDIARAVRAFLDMKERGLAPTKVTYTILIAAFAKENEMDRAFMMLSEMEKAGLEVDVQSYGVLLHALCMEGKMMHARKLFQSMDLKGVKPNSVLYDMMIYGYGREGSSYKALRLIMEMRKNGLIPNVASYCLTIRLLCNEGKCQEAEALIDDMEHAGLQTSETICRILLDAKARLHGSTDDSFT

SEQ ID NO: 3251 - protein, 150 aa, Zea mays
MTEGGVPAEHADEEEKEVYLQNTATADEEEDCRARRGRSPSAARPPRCPTVVQKPLAPCTDARPATCVKCPEWCAFCLETDGCGLFSLVLVTLFDVIVGRWARRRKLDLTSRREVCGWRSLLLCVPCFFLFGLEDQGSRQAVQLYREDEH

SEQ ID NO: 3252 - protein, 171 aa, Zea mays
MPRAPLLDDEFSTHPSLTTPNSPPQVGPGTPFGSVPPSPIIVVSSPPGSGPDPGSGSGGGGSGSGGGPFQPPIIYPPPLAPPLAPGAGQTLWCVAKPTVPDPIIQEAIYYACGAGAGCDSILPSGSCYRPNTVLAHASFAFNSYWQQAKATDGTCDFGDTATIVTRDPSSD

SEQ ID NO: 3253 - protein, 364 aa, Zea mays
MQLKPPARPKLYSGLMPQEDLDPYRDLIPGLPEDLAKICLALVPRAHFPAMGAVSKRWMSFLESKELVAVRKEVGKLEEWVYVLVPDAGAKGSHWEILECSGQKQSPLPRMPGLTKAGFGVVVIGGKLFVIAGYAADHGKDCASDEVYQYDSCLNRWTVLAKMNVARCDFACAEVNGVIYVAGGFGPNGESLSSVEVYDPEQNKWTLIEGLRRPRWGCFGCSFEGKLYVMGGRSSFTIGNSRSVDVYNPNSHAWGQVKNGCVMVTAHAVLGKRLFCIEWKNQRSLAIFNPADDSWQKVPVPLTGSSSTRFSLVVHEDKLLLFPLEEEPGYQTLMYDPAAPMGSEWCTSKLKPTGSCLCSVTIKA

SEQ ID NO: 3254 - protein, 344 aa, Zea mays
MMASRQSGNNAQEAASPLASPPHSNIASIIPSLPLETRCPPFPLRRYANFWVPEVILKADLPGIHSCFKPRPTDVFVASFPKSGTTWLKALAFATLKRSTHPPLDGDHPLRRCNPHDCVRFLDANFNQQKDELEALPSPRVLATHLPYSLLPGSITGDRERSGCRIVYVCREPKDALVSAWLFTRKAASALGADARSFTIQEALELFCDGRCMCGPQWEHVLQYWEESVRRPDRVLFLRYEEMLIDPEAHVRKLAKFMGCGFSEEEEEHGVVSAIVELCSLGKMRDMEVNRNGSNMLGVKNESYFRKGVAGDWSNHMTPDMAQRLDKVVEDALQGTGFSFTSKA

SEQ ID NO: 3255 - protein, 449 aa, Zea mays
MDVVVVAGSSDDHRRRRKGSSDHVVAQLLESPLPTPRRSCCGRPADTPAARRGCADASPRRGHVPFKWESSPGVPKSAAAAAEREVPLPKPPPGRCGTCHAARARARAYHHHSTATADSSSSDRQDDDTFSDALDRVSSSDRLALAAISARLSAIDGAFGSRRSPSFIMDRFLPAANAIATTSADKHPRRRPSSRRSKSKRDRDREAEAAATATARAIVAMHVRRRALPSEQPIYSPQQPQCEREDAAAQAQLPSCAKEDARGEQTPPKACGFMFFFPWSAKPVHLGFQRSPARPRTPRGDVASVTTTASASPPRRSVTLGDALEKERKVRDGSLSHWYDEKSGSGKEWGMALLGTSKRYCADARKALSRLTRSGMDSGDSPRIGRERSSSKHKHKQAASMPLPRATSVKLPPLSPPSESWLSNARRSNASITKIDGTCDRRESPIAHT

SEQ ID NO: 3256 - protein, 188 aa, Zea mays
MAKARRPPFAAAERFLGFPRGGPSPGAVAPAPAALDDLPDLAEADVWYSAADPGSPYPAASRHAAAEGRSAGQRGPRRGVQGGLSRAFGDGSGSGSGRQAAASAPVEVAAWPARFSVPDAEPTLLFEMEMGDDDDDKGEGDAGWVPPHVYLARRQARASVVEGAGRTLKGRDMSRVRDAVWSRTGFDG

SEQ ID NO: 3257 - protein, 304 aa, Zea mays
MSSVHFFPASSQTPVPACLLKTSPKSPLPCPRTLATTSLQSVGGNCNAWHRPHLRLQRRVRTPAAPSDAPPVGPDGGSGGGGAGGGSGGEDEEEEGEKKKGLLPEWMNLTTEDAKTVLAAVAISLAFRTFVAEPRFIPSLSMFPTFDVGDRIVAEKVTYYFRKPCVNDIIIFKSPPVLQEVGYTDNDVFIKRVVAREGDVVEVHEGKLVVNGEGRNEEFILEPPSYDMNPVQVPENSVFVMGDNRNNSYDSHVWGPLPAKNILGRSIFRYWPPGRIGGTTKGCFSPELSPGAKPESLTDVKSTK

SEQ ID NO: 3258 - protein, 721 aa, Zea mays
MGSSYDPYPSPAADDLFLYLSDLGPASPSAYLDLPPTPQPQPYPQSQQQQQGSKGPTQDMLLPYISSMLMEDDIDDTFFYDYPDNPALLQAQQSFLDILSDDASSPTTTTGTTNSSASVNHSSSDASASAPLTPAAVDSYSPAPAVQFDGFDLDPAAFFSNGANSDLMSSAFLKGMEEANKFLPSEDKLVIDLDPPDDPKRFVLPTRAAENLAPGFNAAAATTAPAAVAMAVKEEEVILAAPDAALGSGGVVLGRGRRNRLDDDEEDLELQRRSSKQSALQGDGDERDVFEKYIMTCPETCTEQMQQLRIAMQEEAAKEAAVAAGNGKAKGRRGGREVVDLRTLLVHCAQAVASDDRRSATELLRQIKQHASPQGDATQRLAHCFAEGLQARLAGTGSMVYQSLMAKRTSAADILQAYQLYMAAICFKRVVFVFSNNTIYNAALGKMKIHIVDYGIHYGFQWPCFLRWIADREGGPPEVRITGIDLPQPGFRPTQRIEETGRRLSKYAQQFGVPFKYQAIAASKMESIRAEDLNLDPEEVLIVNCLYQFKNLMDESVVIESPRDIVLNNIRKMRPHTFIHAIVNGSFSAPFFVTRFREALFFYSALFDALDTTTPRDSNQRMLIEENLFGRAALNVIACEGTDRVERPETYKQWQVRNQRAGLKQQPLNPDVVQVVRNKVRDLYHKDFVIDIDHHWLLQGWKGRILYAISTWVANDAPSYF

SEQ ID NO: 3259 - protein, 608 aa, Zea mays
MVGLLPETNAAAETDVLLDAWDFKGRPAPRATTGRWGAAAMILVAELNERLTTLGIAVNLVTYLTGTMHLGNAESANVVTNFMGTSFMLCLLGGFVADSFLGRYLTIAIFTAVQASGVTILTISTAAPGLRPASCSATGGGVVGECARASGAQLGVLYLALYLTALGTGGLKSSVSGFGSDQFDESDGGEKRQMMRFFNWFFFFISLGSLLAVTVLVYVQDNLGRRWGYGACACAIAAGLLVFLAGTRRYRFKKLAGSPLTQIAAVVVAAWRKRRLPLPADPAMLYDVDVGKAAAVEDGSSSKKSKRKERLPHTDQFRFLDHAAINEDPAAGASSSSKWRLATLTDVEEVKTVARMLPIWATTIMFWTVYAQMTTFSVSQATTMDRRVGGSFQIPAGSLTVFFVGSILLTVPVYDRLVVPVARRVSGNPHGLTPLQRIAVGLALSVVAMAGAALTEVRRLRVARDSSESASGGVVPMSVFWLIPQFFLVGAGEAFTYIGQLDFFLRECPKGMKTMSTGLFLSTLSLGFFVSSALVAAVHRVTGDRHPWIANDLNKGRLDNFYWLLAAVCLANLLVYLVAARWYKYKAGRPGADGSVNGVEMADEPTLH

SEQ ID NO: 3260 - protein, 417 aa, Zea mays
MILRIRSRDGTDRISVPDSASATVADLQRLIESHLTVPVPLQRISLDPALLLPNPSAAVPLLADPAAPLASLRLANGAFIYLAYPPDARSARPTPPKVLSAAGSFGKKMTMDDLIARQIRVTRQENALCAAASFDRDAANAFQLYVAEYLAFAVKRAGFLYGRIDAETKEVLVDFIYEPPQQGFEDVVHLMRDPDEEARVDTIAEGLGMRRVGLVFTQAVGRRASKTGEYTMSNREVVQAAQLQAEGGTPEWVTAIVKLEVGDDGTGDVHFEAFQMSEICVKLFKDGVLETEVQDADDPRLSKMRKEVVAGGKDTMKVDNDFFLVPVKISDHQGPLSVGFPIENRGSPVGMSALRSHLERMKHLTFVRRISDFHLLLKLATFLDAKSDMPTIAACVKTQSRMPEGYQFLIESFASQG

SEQ ID NO: 3261 - protein, 412 aa, Zea mays
MAGRTAPASLPSFSLTPDSLAAPLSWISSWTLPRPTIDIMSKFFKLMVVLQLMNDLNEVFKMPLSLVLRLIVCLRFFDLSIIPLRYWNKRIIASLRANQFCERLPSPNGESTVDCHQISKMPNLAFTIANKTFTLTPEQYIVKLEQAGQTICINGFMAFDVKHEEVIGLGLGVVGAEHPGAVRGEGSQQPPGVRVPGAPGRHQRLQPPAQGRRGGFGSVYKGVVRLPGGPAGGTVVAIKNSIPMVIRSSRLSHSGISHLPADEVKPLVKYDNDEDAHSPGGRGRGRGGRGRGRGRGRGGRGNGFNEYADAGWEDDHAPAYMGNGYARGRGRSFRGRGRRGDDDNQPEYQHVGGFKGMRVMRVKNLNLYAFGLYMQPTSIREKLGPKYASFPTDKLMENPDFYSNLLRSNLLS

SEQ ID NO: 3262 - protein, 262 aa, Zea mays
MVGARTGAVVACRQGRGAGARAVGASAQVGGPRLRCRPLRQRGRAGPRDHPRHRHADGRPQRPAAALLPGASPPHRPQSQAHQRATVRLHPRRRPLRLHPPPGRRRQPPGLLPLQHPHSYRHHSPPASYTQASHGVDILPELSMGLIADPQRSGQFVVAQLHPTISYRKPNKLLYFSTAKGRWFVRNLTRARQRVRMHNPNEIGVVAHDGRLWWFAPSYGVFCCDPFTPVLKCPELRFIPLPANSEMFAATSPLTPSSGPSS

SEQ ID NO: 3263 - protein, 122 aa, Zea mays
MHVQEGDPLKPAVTGVLVFVSTPDPIGNKYYLGPAPLQDMARQIATANGPTGYNRDYLFSMEKALASISHEDDSIIELANEVRKVLNRTKETKITGANASMKSHAPLVHLSALPEGTVVDSR

SEQ ID NO: 3264 - protein, 928 aa, Zea mays
MAPPPTPPTRPAPAPQATGATATPLRTPASKHRLHFPAATPRNANHGGATEHPVEVIGRIRNLASGVSSALEFAGGGTAVRVRGDAGGCRDFTLDGVSVSEEEDLEGFYRRFVRSRIQGVRVGAKCTVMVYGPTGSGKSHTMFGCARQPGIVYRALRDILEGGGGSEGDSAEDDAGLFVQVAVLEIYNEEVYDLLVGSGAAAKGNAPKARLEVMGKKAKNATYISGNEPGRISREVSKVEKRRTVKSTLCNERSSRSHCVIILDVPAVGGRLMLVDMAGSENIEAAGQTGFEAKMQTAKINQGNTALKRVVESIANGDSHVPFRDSKLTMLLQVHYYKNLHLLIQPLLSSDDLNISFIVFQDSFEDDKSKILMILCASPDPKELHKTVSTLEYGAKAKCIIRAAHAATPRDKMSSEESSAMLNSRIVAMNQFIHKLQKENKLREKERNEARNVLKLREEELAQLRAKLNLIERQGKATENEINSKVMEKTQTLRGELMKMEEAMYKQQQELCVLRQRLQEVEREKADSCQPGQQDVIGGRLLARLSEMPAGLDQSMAIDMSMDLDMGDQTSMQDVKVIKEDTCQQGQIWNHTTTAASACTGSLVQEDDVRLSGYPEKTVLSTVFEEGDEDYAEKKCGLQEEVRKEVVDENFKVDIAQHTLSEPDHPATRKHHIENMFRLCGNHREIAKKPKVQSPAKEMFWNENQSPAKQVFGNQNKSPANKIFGDENKEPLAWGAIETPMCDVRVTDSPVSSQLSPIVCQVVDAPLSAQPDTCSAVEESDPNKENSLAGQKDGGLLEVYIKWESGNLIKGLKLLHNSCLSDLRKFIEAHFEEAGSKQKHQFTFLLLGDPSGAPVSRDTEASVQISRLPHWNNQPDSYLACLRAAKKPSADHVPFSPLDSNLNTVHLAGAVSPKVNQMSPSYIRELRA

SEQ ID NO: 3265 - protein, 344 aa, Zea mays
MSSYSHSTKNFLGFLLGAAVTAACILLLLPPAPCPCGVLPAQQESVVLGNGNGTQADPSMKKLHMAGNSTDHELLELLKRAAMDDRTIIMTFTNEAWTAPGSLLDLFLQSFRLGVRTAPLLKHLIVVAVDAMAYERCQHVHRLCYHLRVDGVDYAAEQSYMQKDYLDMMWRRNRFQARILELGYSFVFTDVDIIWLRNPLLRIPVGADMAMSCDFFYGDNPYDLNKLANGGFVYAKANARMVAFYGSWYESRKGFPGAHEQYVFDQVKQELSARHGVRVQFVDTAYLSGFCELRKDFYRVCTVHANCLVGLQSKLQKLTQVFDEWKQFREKAALLGSNTTALTD

SEQ ID NO: 3266 - protein, 261 aa, Zea mays
MATSDKKTRGYVPWNDEMDKVLLDTFVDYYNKGDRCQNGWKSHVYTAVVKNVCEKCNVTITKENISSRSKTFDKHYNIINGLLSTSGFGWDWEKNKLKVDSDTVWDEYIERNKEAKGYRHKVVKFWDLLSLVYNKDQANGEGAKTAAESSKEMAKENDTGGKDAPYSVSSSSSLKRQRSDDSFNSIWCDKFDMLTSALKDDGPKLPSSAEVLAALQEVEGLDEDTELELYDILTSNARKFESMMALPMERRKRWLMMQLRK

SEQ ID NO: 3267 - protein, 257 aa, Zea mays
MAPKRGGRAPVPAKKKAVVTNPLFEKRPKQFGIGGALPPKKDLHRFVKWPKVVRIQRQRRILKQRLKVPPALNQFTRTLDKNLATNLFKMLLKYRPEDKAAKKERLLKRAQAENEGKTVESKKPIVVKYGLNHVTYLIEQSKAQLVVIAHDVDPIELVVWLPALCRKMEVPYCIVKGKARLGSIVHKKTASVLCLTTVKNEDKLEFSKILEAIKANFNDKFDEVRKKWGGGIMGSKSQAKTKAREKLLAKEAAQRMT

SEQ ID NO: 3268 - protein, 195 aa, Zea mays
MAAITAGLLVLLAAAVAAPAHATDYTVGDSSGWSSGVDYATWASGKTFAAGDNLVFQYSAMHTVVEVSSADYGACSASNSIQSYSDQNTKIALTAPGTRYFICGTPGHCGNGMKLAVTVAAGTATTTPASSPPAADSPPETATPSGSTPTATTSPSAPTTKPTSSSTGAACGGEARLAMGVLAWAAGLAGLALMG

SEQ ID NO: 3269 - protein, 438 aa, Zea mays
MGEVHEADKNIEIWRVKKLIKALDAARGNGTSMISLIMPPRDQIARVTKMLGDEYGTASNIKSRVNRQSVLAAITSAQQRLKLYSRVPPNGLVLYTGTIVTDDGKEKKVTFDFEPFRPINASLYLCDNKFHTESLNELLTSDDKFGFIIIDGNGTLYGTLSGNSREVLYKFSVDLPKKHGRGGQSAVRFARLRMERRHNYLRKVAELATQYFINPGTNQPNIVGLILAGSADFKSELGKSEMFDPRLQAKVVKMIDVSYGGDSGFNQAIEMSAEVLSDVKFVQEKKLIGKYFEEISQDTGKYVLGIQDTITALEMGAVEILIVWENLDVRRYELKNSATGETVVKYLNPAQEADQSNFTDEATSGDLEVIDNTQLLEWFAENYHQFGCTLEFVTNKSQEGSQFCRGFGGIGGILRYPADVSAYQDGDLSDGEYDEDLE

SEQ ID NO: 3270 - protein, 216 aa, Zea mays
MATPWWWPSLLPAWLSSSALWFLVANAVVAAVAILSRRPPLPLPLPLPSPRRRRRSSGAAAALTRRASSALLQRLRSFSIFAVPSACFNTTTPFPHPDAAQGTETEAPARTPASPLSSLGRAPAADADEEDSEPGGMSMDEAYALALEARRRPDREREEAPRRSEVDAKPEEFIRGFEDHQRQQRLNSIFNYTQMLKQRAAAARRQRQPDAPPDQL

SEQ ID NO: 3271 - protein, 218 aa, Zea mays
MADSGLIDVQKLLTDVVDKLTSLETKMTTVERELCTVKLDQRRLQDAVEAGKQAAFPGVLELRLPEYDGTDDPAIWLHRFELFFSLQRTEDDDKVCLAAFHMTGAAQIWYSLLKHNRGVPTWPQLAESVRRRFGAPTSGYALRELLRLRHTGSVAEYRDEFLRLLDRCDGVTEPLQVAFFTAGLRDPLLTDVELRQPATLDDAMWLACALEASSTGKN

SEQ ID NO: 3272 - protein, 104 aa, Zea mays
MMDHGGEEAVAINVDLFVVVEAKDHGSRRPWRTSTRCPAPRSGGGGRGEGARRGSEWGAATDGMSSMTGVGDSRCVVCGGAGAAVADAEGIARAAKDKELCPRA

SEQ ID NO: 3273 - protein, 69 aa, Zea mays
MHLFGLLLNREIGLYIFLILISILIHIRCPTDNANRSYLMSDSGLYVYDRSIEILQDSTFVIYSIYHIR

SEQ ID NO: 3274 - protein, 526 aa, Zea mays
MAVLAELGTVPAAGYSRSDVAAALWQQLKSPVVVPLLRVSVALCLAMSAMLFAEKVYMAVVVAASRLLGRRPERRYRWQPIRDGDDLEAAAAYPMVLVQIPMFNEREVYKVSIGAACGLSWPSDRIIVQVLDDSTDPVVKELVRAECWRWASKGVNVKYEVRDSRRGYKAGALREGMKRAYARGCDLVAIFDADFQPEPDFLWRAVPFLLHNPDLALVQARWKFVNADECLMTRMQEMSLDYHFAVEQEVGSSTYAFFGFNGTAGVWRISALNEAGGWKDRTTVEDMDLAVRASLKGWKFVYIGDLMVKSELPSTLKAYRYQQHRWSCGPANLFRKTLVEIVRNKKVTLWKKIHVIYNFFLVRKIVAHAVTFVFYCIVIPTTVLVPEVQVPKWGSVYIPTVITLLSAVATPRSAHLVVFWTLFENVMSLHRTKATFIGLLEAGRVNEWVVTEKLGDALRTKVPGKKPRMRIGDRLHVLELGVAAYLLFCGCYDIAFGNNRYYIFLFLQSIAFFIVGIGYVGTFVPH

SEQ ID NO: 3275 - protein, 500 aa, Zea mays
MDAGGLGFLVAGSRREFVVLNVDDFSKQGSSQGCPDYICQICGDDIDILQEENEYFVACNDCAFPVCRTCYEYERQEGTQVCPRCKTRYKRHKGSPRVHGDEEEEGSDDIESEFASSIAGRSNIVHPYRVSVAESSINSWDIDSVSITNSGASVHFYEEHVGTPTNHHALVVHPNTGEIMRYNPLQTRPINPNRDLALYGYGSVAWKNRVEWKTKQQNKMQKVSSDGEGSDLNDFDSDCDIPRCAESKQQLSRKVPIPSSKINPYRIVISLRLAILGLFFHYRILNPVHDAHWLWLTSVICEIWFAFSWILDQFPKWHPIQRETYLDRLSLRYEKEGKPPELARIDVFVSTVDPMKEPPLIIANTVLSILAVDYPVDKVCCYVSDDGAAMLTFEALTETCLFARKWVPFCKKHKIEPRAPEWYFAQKIDYLREKVHPEFVRERRAMKREYEEFKVRINTVVANSCKVPEGGWSLPEGAPWHGNNVRDHAGMVQVGCFICL

SEQ ID NO: 3276 - protein, 102 aa, Zea mays
MASPPPDVDLGKLSYEIFSLLESKFLFGGGSVPGTPARAAAPGPGEDRGRVRVLAIDGRGPGPGDALLAAAALARLEAALRVAADGSRGGLIGRLFGWGSLH

SEQ ID NO: 3277 - protein, 194 aa, Zea mays
MSPLYINMSRLLGRGFRQRKQASKKWPSGRPPALAPARPPPPPPPPPDAATSSSSTPELTSRVHAAADAPPPLPLQPPLPPPLPVLPATLRPKSIGGGEEEPTPGLDPPPRPAGAAGRCDRARTRSVARVFVSARRCEGEGRDGRCAVSVCLKGRQEVEWFYEVSVERGWVVGPGGPSAWPTWQCWLVGFVASR

SEQ ID NO: 3278 - protein, 692 aa, Zea mays
MAAASEDALRRSLAERQAAVDAQAEAVRALKAGGGASKADVDAAVEALKALKVEAGAAARRLQQAVGAGAGGAAREELRQAVVNTLERKLFYIPSFKIYRGVAGLYDYGPPGCRVKANVLSFWRQHFVLEENMLEVDCPCVTPEVVLKASGHVEKFTDLMVKDEKTGTCYRADHLLKDFCKEKLEKDLALPQEKADEFKRILAILDDLSAEELGAKIKEYDIVAPDTKNPLSDPYPFNLMFQTSIGPTGLSVGYMRPETAQGIFVNFKDLYYYNGQKLPFAAAQIGQAFRNEISPRQGLLRVREFTLAEIEHFVDPEDKSHPKFVDVADLEFLMFPRELQLSGESAKLLKLGEAVAKGTVNNETLGYFIGRVYLFLTCLGIDKGRLRFRQHLPNEMAHYAADCWDAEIECSYGWIECVGIADRSAYDLKAHSEKSGVPLVAHEKFSKPREVEKLVIVPSKKDLGLAFKGNQKMVLEALEAMSEKEAFEMKAELETKGETNFKVCTLGKDVVITKKMVSISMEKKLEHQRVFTPSVIEPSFGIGRIIYCLFEHSFCTRPSKSEEEQLNVFRFPPLVAPIKCTVFPLVKNQEFDAAAKEIAKALTTAGISHIIDTTAISIGRRYARTDEIGVPFAVTVDSATNVTIRERDSKEQIRVDINEVASVVKQLTEGQSTWADVSAKYPAHVGPQGDQE

SEQ ID NO: 3279 - protein, 487 aa, Zea mays
MSSDSCVVLKGLPSYIANLLDKPLKKLEGLVYGDFSFARPSAKKPTFLRLRGLFEDEISSCNHSISPFFSTPGFATFRNQEIATGAGAIREQLADLDLRIIIENSLVEWKELEDEGYSGDEWEDRKRRIRKVFLIRRMQLAKHFIQSNVEPEWMVLCLLPVLPPELRPIVYRSGDKVVTSDINELYKRVIRRNNNLAYLLKRSELAPADLVMCQEKLVQEVVDTLLDSGSRGQPTRDGHNKVYKSLSDVIEGKEGRFRETLLGKRVDYSGRSVIVVGPSLSLHQCGLPLEIAIKLFQLFVIRDLITKRATSNVRIAKRKIWEKEPIVWEILQEVMRGHPVLLNRAPTLHRLGIQAFQPTLVEGRTICLHPLVCKGFNADFDGDQMAVHLPLSLEAQAEARLLMFSHMNLLSPAIGDPICVLTQDMLIGLYVLTIGNRLGICANRYNSCGNSPNKKVNYNINNYYKYTKDKEPHFSSSYDALGAYRQK

SEQ ID NO: 3280 - protein, 451 aa, Zea mays
MAAATSRGPASVAICALAVLHAMAALCDSATAAAATCAGLAPAKHRPEVISIADFGGVGDGRTLNTWAFRKAVYRIQHQRRRGGTTLHVPAGTWLAGSFNLTSHMTLFLARGAVLKATQDTRGWPLVEPLPSYGRGRELPGPRYASFIHGDGLRDVVITGDRGVIDGQGEVWWNMWRRRTLEHTRPNLVEFMHSTGIHISNIVLKNSPFWNIHPVYCDNVVVTNMMILAPRDSPNTDGVDPDSSSNVCIEDSYISTGDDLVAIKSGWDEYGIAYGRPSAGVTVRRVRGSSPFSGIAIGSEASGGVRDVLVEDCAIFDSGYGIHIKTNVGRGGYIRNVTVDGVRLTGVRSGVRIAGDVGDHPDAHFSQLAVPTVDAVRISNVWGVNVQQPGSLEGIRASPFTRICLSNVKLFGWRSDAAWKCRDVRGAALGVQPSPCAELATSFASARSSCS

SEQ ID NO: 3281 - protein, 282 aa, Zea mays
MGSPSSLPAAAALVLLALLAGAQCREAQFDAADAGAENFNTSEAAVYWGPWQKARATWYGQPNGAGPDDNGGACGFKHTNQYPFMSMGSCGNQPLFKDGKGCGSCYKIRCRKDPSCSGRTETVIITDMNYYPVSKYHFDLSGTAFGRLAKPGLNDKLRHSGIIDIEFTRVPCEFPGLKIGFHVEEYSSPVYFAVLVEYEDGDGDVVQVDLMESKTARGPPTGRWAPMRESWGSIWRMDTNHRMQPPFSIRIRNESGKTLVARNVIPANWRPNTFYRSFVQYS

SEQ ID NO: 3282 - protein, 452 aa, Zea mays
MALLVKSHHQMLVSSSTSSSSPSASQQRQPPPPPPSSSCLTEQQPSPAKRKRRPPGTPDPDAEVVALSPRTLLESDRYVCEICGQGFQREQNLQMHRRRHKVPWRLVKRAPPPPAAAAGGGGGAADANNSSGTGGGAGGGAPRKRVFVCPEPSCLHHDPAHALGDLVGIKKHFRRKHGGRRQWVCARCAKGYAVQSDYKAHLKTCGTRGHSCDCGRVFSRVESFIEHQDACNSSRMRGEAVVVAVPVPVPPPSALPVIRPAVPRHPPTVAVAPPPPPVLQLLPASAAASAPRTSSATTTASPSTTTTASHHQAKPHAATTTKLQLSIGPIVTAAAAAAVDCGEDESEAEELRRAVEEKAAADAARERARGEAAAAERALDEARRARQRARADLEKACALRDHAARLLGQVTCHACRHRSLAVAVVRGAAEGHAAGPAVACDSIRGGGLGAGI

SEQ ID NO: 3283 - protein, 75 aa, Zea mays
MSSSSVFDRPGRVLVFVVPSLHQHLVRLPKITVAARGFQLLCFCWTTPLSRLMLPRLFVSLLSSLVRRSLGLLPA

SEQ ID NO: 3284 - protein, 149 aa, Zea mays
MSGRSSAGGPSGGECYTCTQPGVPAFHSTTCDQVHSPGWDANAGSSLVPVQGQAQAAAAAAPRHAAWWLLGPVLDPRSRRVTRAALELLDPAGPRRRAGGGLALLLRAFLEGLASSPRRSGTTLRRGRRRLSSTAASIAIAATPALLAA

SEQ ID NO: 3285 - protein, 129 aa, Zea mays
MALQWMILACVVAVEAAVAALVTLPVPRAVRGQIVALTSLFLQPLSSVIPFAAFQILDLYWKKEHRLMCTSEICTAEERIRFEKSMFKAQRNVILCVSACLLYWCIYRIVKLNKDIKALEETEKRLKEE

SEQ ID NO: 3286 - protein, 108 aa, Zea mays
MAKADTNDDDDFVSLAEFATLNATMVGETAIGPPTRTSGCQAVRVFNANNGTISAAELVRVLCSLGKSTFVVHCCRMIEGVDQNVGSFIFFKEFKIMMAGAVASLRSC

SEQ ID NO: 3287 - protein, 447 aa, Zea mays
MGKEKSHINIVVIGHVDSGKSTTTGHLIYKLGGIDKRVIERFEKEAAEMNKRSFKYAWVLDKLKAERERGITIDIALWKFETTKYYCTVIDAPGHRDFIKNMITGTSQADCAVLIIDSTTGGFEAGISKDGQTREHALLAFTLGVKQMICCCNKMDATTPKYSKARYEEIVKEVSSYLKKVGYNPDKIAFVPISGFEGDNMIERSTNLDWYKGPTLLEALDQITEPKRPSDKPLRLPLQDVYKIGGIGTVPVGRVETGVIKPGMVVTFGPTGLTTEVKSVEMHHEALQEALPGDNVGFNVKNVAVKDLKRGFVASNSKDDPAKEAASFTSQVIIMNHPGQIGNGYAPVLDCHTSHIAVKFAELITKIDRRSGKELEKEPKFLKNGDAGMVKMIPTKPMVVETFSAYPPLGRFAVRDMRQTVAVGVIKSVEKKDPTGAKVTKAAAKKK

SEQ ID NO: 3288 - protein, 104 aa, Zea mays
MAAQPGQAEEEQGWRGPNTEPWLEGTRHGRAERDAVRAEERGKPEGEQAGADAPGTREQVPGTRQQGGAGRLGGREGEVPAPWEAWELWPARRKKTREAVASEH

SEQ ID NO: 3289 - protein, 450 aa, Zea mays
MAAPAPALMQLKVRIPENEEVARCLHEKRLSMREQPAGFKEHLDRTFAKAYRNVCAANEPIRTLKEFSKINGVGPWLIRCMKGFFAESKQDSPAKGKKTRVPKCCVTKKKTAASASLGKGPPSNLNCQNAQFSSSQGTLELQPSGKTGSTDFNMLDKDVVSMNNCILAMPPRQSSEEFLEAYEVVLILDDRENFGYCSRKVASKKVADNIGSQFNVPVEVKRLPVGDGIWIARHKKNFTEYVLDFIVERKNVADLGSSIRDNRYKDQKTRLQRCGLRKLMYLVEGDPNTSKGSAASIKTACFTTEIFEGFDVLRTNGYTDTMRTYGYLTLSIMDYYSTNFCRLDKSACICPTYDEFERHCHCLQKRTVSQIFALQLMQVPQVTEKVALTVIEFYPTLFSLARAYSMLEGDIHAQEEMLKNKSKMINAGASRNIFRLVWGDGCQSSGLILD

SEQ ID NO: 3290 - protein, 385 aa, Zea mays
MDASTEVTDAIAAVGIDNGPTGKLPPRDSVGGHAEEHDVLADGTHSGESEVINPSEEVEMEATSQSQDIKPRVPEGVQGHSPKVVTKSPRQSPRGGDKSEARKISPSPYPKVPIARVSDLDIVDSSSSNGDTGASKKKTEKSSFRPIAKESLSLEDSKEKNKTQKASNQRSAKNDIDEESNESVKPQRVGSTPSYGFSFKCDERAEKRREFYSKLEEKIHAQELEKSNLQAKSKETEEAELKMLRKSLKFKATPMPSFYKEPPPPKVELKKIPTTRARSPKLGRSKNTPSGGTEGNSNPPARSARLSLDQRVPQNGAKKAPAANAAKKPQRKSLPKLPSEQTAKVVDIAASVPSGEELGKKPSLTGLVREPIRAQLTPDEPGLSV

SEQ ID NO: 3291 - protein, 414 aa, Zea mays
MAAAHLFCSAPAAYRAANPRPLATRGRANPATGTYLVLKGVWCSCAHFPRATPSRRFFPCRASLSPDGSLAMLGAPSPRMAPPMRKPYMREHSCLIFPPPRGRRPLAVIKFLGGAFIGAVPEVTYGYLLELLALEGFVVVCVPYNVTFDHEAAAREVFQSFHACYDALLASGLPEAGLSALDIAELPLYSVGHSNGALLQLLVGSYFSERIPEANAIVSFNNRPASEAVPYFEQIGPLFRQLMPMMEASPVYSMARNASGYAWKALFDLAGGLLREYDQEATVSLSKFIDQLPSVMNQVSEGVSEFKPTPPENREFCKNSYSVPNTLLVKFTVDAIDDTDIVEDVLRPRVDSIGGQIKKVILSGTHLTPCIQDVKWQVGSEYTPADAIAQGLKSLALSETRVLSRTIADWFTSL

SEQ ID NO: 3292 - protein, 599 aa, Zea mays
MADSGGISADNAAAANDDDDTNTAPFPDTVQVGGSPEYKVERKLGKGGFGHVFLGRRLTAAHAARSAASAAQEVAIKFEHTSSKGCTYGPPAEWQIYTALGGTHGVPKVHYKGRQGDYYVMIMDMLGPSLWDSWNSLGQSMPSEMVACIAMESISILESMHSKGYVHGDVKPENFLLGQPSTPHEKKLYLVDLGLATKWRDTANGQHVSYDQRPDAFRGTVRYASVHAHLGRTASRRDDLESLAYTLVFLHRGRLPWQGYQGDNKSFLVCKRKMSTSPEALCGICPQPFKEFLEAVVNMKFDEEPNYSKLISLFDSLIGPIPSIRPINTDGAQKVGQKRARLLNDDDDHVKKKIRLGAPATQWISVYNSRQPMKQRYHYNVADARLAQHVEKGNEDGLLISSISSCANLWAIIMDAGTGFSAQVYELSSHFLHKEWIMEQWDKSFYISSVAGSNNGSSIVVMSKGTPYTQQSYKVSDSFPFKWINKKWKEGFHVTAMATSGNRWAIVMSRSAGFSEQVVELDFLYPSEGIHRRWDNGFRITAMAATMDQSALILSKPRRRPRDETQETLRTTQFPSQHVKDKWAKNLYLAGICYGRTVA

SEQ ID NO: 3293 - protein, 142 aa, Zea mays
MYNHIYFCFFFLSHGGQAVETRETRRTRERKPTGSAAPAHLPHPQKKSRVPPAATTITAMISILAQERLLGFALGSVSIGGFVLHQRRAIYRSIAEADGSPYFYQPGEIASRRSSTELAHVWNKAVDETLGRLVVYLSSRGW

SEQ ID NO: 3294 - protein, 82 aa, Zea mays
MGTSAAGNNADRGGARPDAMGRAESSERSWDDAQRRSRLRAAAKTSAEETPTGRRKEEAAGAKLHGQELGANSSRRKGAGTA

SEQ ID NO: 3295 - protein, 166 aa, Zea mays
MAQRRDRTGRNALNRGAQPEELDNRELSRGTTPSWVQAEARFGEVTTWASLVGAGREEWRSRRERAAWREKRHGDERGREQRRQRRSSAGRHGASRELGAELGRRAEEEPAARGCQDKRRGNSDRAPERRGRRGEAPWSGAGGELEQKEGSRHGVKILSRGGTAVS

SEQ ID NO: 3296 - protein, 515 aa, Zea mays
MELAGAASPHPPPESHVAPPRPPPQPPEEDLCEDRGDMSVTGEKPCTHRESDVGQTNSCSLNNSSECENHTPSNDEISEPESNLEMAKTDQGGDVPSGEKVLKKPDKILPCPRCNSMDTKFCYYNNYNIKQPRHFCKSCQRYWTAGGSMRNIPVGAGRRKSKSSSASCRSVLIPVPGSSSVANPGGEASLFPLSVKANQAAVSFGPDSPLCTSMASVLKIGGGGEQVKSCSPASAAAQPRNGETQTQTCAPSSAATTPSDGPGNGLQKGAESAHQNQNQNQNGIIGHSNGVTPVHPIPFFPGPPFVYPWSPAWNGIPAMAAAVCAAPATAEAAISSEHGTASSTVQWNVPPAIVPVLPPGFCGPIPVPVIPPPSVWPLITPWPNAAWSAPWLGPSASVPPGSSRSSGSSTCSDSGCGSGSPVLGKHSRESRPQGDEKAERRCLWIPKTLRIDDPVEAAKSSIWTTLGIEPGDRGMFRPFQSKHGRQQELQASGAARALQANPAALSRSQSFQETT

SEQ ID NO: 3297 - protein, 637 aa, Zea mays
MQFGTPLPPAARRAPTFHADPAADARQLLGALLPPRPALYHVLQAHARLAVLGLATARALPQLLAALPRLTLAAADVSHSYPLLLFRCSNCTSAFASNHLLRVLPHPLPLRLFPRLPRRNPHSFTFLLASLSNHLDTEPAAAGSIASRFMGTHVHALAVKAGAAGDLYVRNAQIHFYGVCGDVAAMRKVFDELPIVRDVVTWNAVLAGYVRAGMVGVAREVFDGMPVRDEVSWSTVIGGYVKEGEPEVALGVFKNMVAQGVKANEAAIVTALSAAAQLGLLEQGKFVHEVVKRVGMTMSVNLGAALIDMYSKCGSVAAAKEVFDAMPRRDVFAWNSMICGLATHGLGHDAVQLFEKFVSEGFCPTSITFVGVLNACSRTGLVDEGRRYFKLMAEKYDIESEMEHYGCMVDLLSRAGLVQEAVELIEGMRIPPDPVLWGTILSACKRHGLVDLGITVGNKLIELDPAHDGYYVLLASIYAKAKKWDEVRKVRKLMSNRGTSKSAGWSLMEAHGIVHKFLVGDMNHKDSARIYNMLCTINRRLAEAGYVPDVSSVLHDIGDEEKVHAIKVHSERLAIAYGFIVVEAGSPIRIVKNLSVCGDCHEFSKMVTKVFGREIVVRDGSRFHHMKDGKCSCHDYW

SEQ ID NO: 3298 - protein, 573 aa, Zea mays
MMGALQLQSNGDGAAEGLLPDPGYVEVDPTGRYGRYNEILGKGSSKTVYRAFDEHRGMEVAWNQVQLHDFLRGPAELERLYGEIHLLKSLRHRAVMRLHASWADAAAPRLAVNFVTELFTSGTLRQYRLRHPRAGAAAVRRWCRQILDGLAYLHARGVIHRDLKCDNIFVNGSQGQVKIGDFGLATVARRRGSPHAARCVVGTPEFMAPEVYAEGYDERADVYSFGMCVLEMVTLEYPYSECVHPVHIYKKVTSGIKPAALYKVKDPAVRRFIDRCLAPASRRPSAAELLSDPFLQLEDGCGLGYGDDADYSAMYNYLHQPACLDHHHHAGSIGSTASNGVVSNGGGGGGGRWDDESEDEDDDGSMFQGIDQLFNEHEDDELHVAGVDITIKGKRMQDGRIFLRLRIADKDGTGRVRNIYFPFDADADTALSVATEMVAELDITDHEVTHIAEMIDGEVGALLPHWRPGPGMDDDDGGGAGPDTSGATDRCKNCRSSASSAGSLDDYMSAAAAARRGCRCAELHGRFEEITFQADEEQVRFQGSGCSSDDGGGQAEQCAGDGGSTVTERSDQP

SEQ ID NO: 3299 - protein, 173 aa, Zea mays
MYGILTSPCPRAPLLRALPSPSARAFPRTLAFPARPLPRGLRLTPPHAAAEASAAATALGGLLASPLSTLEAALRGLNLAPLRAPVAAAMSAAVRWLGVYREVLLVGVLLSWFPNIPWDRQPFSALRDLCDPFLALCREVMPPVFGRKLDLSPLVAFMAIDIIIMILRPQPRM

SEQ ID NO: 3300 - protein, 506 aa, Zea mays
MRLSSTMRRVEHNEEVDHVTWDQAAQHHQPWDQWDHQREQQQAWDQWGQQGEPTDNPMDDGSGGSSATRTRRSRKSHSVKPRHAIEREADRTLIMPHGDRNWEDLSFDGKGHHTQVNLTLGSLCRLHYPGIVKVSNGDTEDEVLVSTWDEYKFKKERNHTDRQGLVRNDFWLRYRLPDGEDYMGHAERVLQNNAKKLVKDAIYYARIQATNLYFQKHPEEAGPLNKKKGSSKIYLTEDQYREVMVPWMAPVPDAYYAWCRYWAFEGFQKASAHHRQCRGTNPNHKFGGDDMIRKAKRMEATSGQKPSDIEVYQEGHKGPDPNNPDQLCSQTATDRLVSFGSKVQTFKVYKFLHLYALFDGFIDSSSVRSQRTGSSSRSSCSRRPNEQELEIMRMREEMRQQREFMEACNAHNQAMYQLMQQQGMTSNFPPPPQWSQFANTPVPPPQFTTPPTHIPAPGDRVTPEAGGSGSDPAVGTGFVDSLFAFPPPGGEGGSGQSSNHPSGGYL

SEQ ID NO: 3301 - protein, 679 aa, Zea mays
MAAAEVLTAAWEEWGLRALVLLSLTVQVTLHILAEFRRHVDSGALRAVVWSAYMAADATAVYVLGHLSVASRSPERELTALWAPFLLLHLGGQDKMTAYAIEDNQLWLRHLQTLVVQVAAAAYVVYGSSAIVGARRLPLLLAATVTMSAVGVVKYGERVWALRRAGTSPTGNYSSDIGKRRFNLAVPDSFISRLDPAETYLLHAHLLLDMAKDRFKGPLPRLYLCGPGSQETQLHGEEELYKVAELQLSLLHDVFYTKAEATHTWCGLCARVLSSLATAAAFVLFNALLLGAHRRKLEGYSRGDVAVTYVLFVGAVVLEAASLVRAVLSSWTCALLVKHGSEGSAVCNSLAPAAVYLRRLVRAAEWRWWRCWSRSMGQLGLVQLCVRSRASRYSRVARWMGVEDWWNTMAYSGPSVPVSPDVRKLLLKSLKARPWDREQFESRGLYGRELGLDWVAESKLEARILVWHVATELYLYWFNKDQLPLPLPAAGAGVADLVEVAQSLSSYMLFLLASRPHMLPPDASRNDYLVVCYALTTHERYSTADDLLSSLQRFADALWANNSAPEYELRCKNTNRRGYKVLRGGCSLAAFLIHHQHQEDSSSSSSSSPAGGTGTLEMICRVWAQMLCCVADECSANSHAKQLSGGGEFLTVVALVAKFMRSKRLSWHLHIESQRTDEW

SEQ ID NO: 3302 - protein, 576 aa, Zea mays
MALQCLVDWKGQPVNPKRHGGVKATMFIYFLVVMTNIGNIPMLLNVVSYLHGKMHMDIADASTTATNFFGAVCVFTFLGAFVSDSYITRFYTILIFAPIEILGYMLLACQAHLPSLHPAPCDVTNSSPSECTTVSGRNLSLLTLGLYLIPVGEGAVRVCAAALGGDQFDREDPRELRGAASFFNWYTFCISLGGFAGLLFVVWVQDNEGWDLAFALSALVALLGTLVLVAGMPFYRHQKPTGSPLTRILQVFVAAFRKRNLSVPEDFVGTHEMTTGETGTIVEVLERTSGFKFLDKAAVNDGDARRWSLCTVTQVEEAKIILRMLPVFVSSVLGYLPIPLLLTFTVQQGGTMDTRLGATNVPPASLFVVPIVFQMLILVVYDRAVVPWLRRATGYAGGVTHLQRIGVGFASNVVALAVAAAVEGRRRAEGGAAAAEMSVFWLTPQFFLLGVMDVTSFVGLLEFFYSEASAGMKSIGGAVCFCILGIASWLGSFLIRVVNRATAHHGTSRGTGWLEGANLSAGRLDLFYWLLAIFELVAVLLYLLCAWRYTYRQHPRMQVQSTVEDHTAAIKQDAAL

SEQ ID NO: 3303 - protein, 768 aa, Zea mays
MDLNVASAAKLAPAFLALAMVFHNFLLEKKNERLDWNDLVLAGPFVLHSHSQTAPSLYTAVSSRARGVRVPPLGGAGQKSLLDGWLRKPDASQVRRLIFTWVPMVRFHSANHLPAFSQYSLLEPMEVQLATEQPGDPFLPLRWESTGDQWWYATPIDWAAANGHYDLVRELLRLDPNLLVKLTSLRRIRRLESVWDDDARLDAAARNRAAVARRLLLDCEPDNDKQPPSRGGGGDAANRLLRAGYGGWLLYTAAAAGDERFARELLAAQPLLVFGEGEYGVTDILYAGARSGRPEVFRLLFDAVLSAAPACPVGGDDGEFRREMMNRAVHAAARGGSLAVLRDLLRGCSDAAAYRDAQGSTILHAAAAKGQVEVVKDLIASFDIANCVDDQGNTALHIAAFRGHVQVVEALITASPSLISATNEAGDTFLHMALTGFGTPEFQRLDRQTELIRQLASGAIVDISSSTIINAQNDDGKTALHLAVVCNLHSDVVKLLMSVPCIDLNICDKDGMTPLDLLRKQPRTTASEILIKQLILAGGFTSSRDHETRSAIASQLKMHSIVGSPGTSFKIPDGEIFFLHAAGVDVSGGIGEGGAAVPFSSVIARADVLHGPKLKRLNSFQDAAKHIKVLFRWPRRGWNKSGSGGRKGLDDDDASSVDSAKTWSHEETPTPLRQRYSRIGSLFNKRTYAAGRASPSEAVKKGGVVQPAGSTLLSTSLSSSSASLVDRFESVHQDNDQSPYVSRLIRHTPKKSGSLNSRLMNQSLRLRA

SEQ ID NO: 3304 - protein, 443 aa, Zea mays
MGEVAALRQLVGQVQELWDLYGANAHPLPRWYLLDFEHGSIMDDYCGGRSGYNSELLKIMEANQSPPRKRPRRDRNREKAPSSNKTEVMQQEIWRDFPEDLFETVIARLPVAAIFRFRTVCRKWSSLLGSDSFSHQYSEAPRGLPWFYTITHENANNNVAMYDPSLKKWHHPSVPLTPTKIVIPVASVGGLVCLLDLSHKNFYICNPLMQSLKEIPPRSVQGWSRVAVGMVLNGRSSSDGYKVMWFGNDGTFEVYDSTKNMWSCPGTFPPSIKLPLALNFRSQPVAVGSTVYFMCAEPDGVLSYDVSTGIWRQFAIPLPPHLTDHTLAEFQGRVMLVGLLCKNAATCVCIWELQKMTLLWKEVDRMPNIWCLEFYGKHMKMTCLGNSGLLMLSLKAKRMNRLVTYNLLKREWQKVPDCVLPYSRKKQWIACGTAFDPVPCALA

SEQ ID NO: 3305 - protein, 298 aa, Zea mays
MAVCTTTEAQFWCCRQLAFTSADGAGPDTSSRSAGDGAAGAGGLSGCGASAGASFLPCCFLLLLCLFLPLDGASAGGSSAGASATGGGVVAGGSDAGASAGGVAVGGGAAAGGSTAGGSTAGGVAGGGVAGGGVTGGGVTGGGLAGATAGATGGGFAGATGVAVGAGVVGAGGGFAGATGVAAGVVGAAGVVGAIGVVGAAGVVGAAGVVGAAGVVGAAGVVGVAGVVGAAGVVGAAGVVGAAGVVGVVGGDCATAAMRWSPRRAPSTARLRHCRSSGAAMLPAVVVCLERRRADAEP

SEQ ID NO: 3306 - protein, 493 aa, Zea mays
MASLNVLLLPEPGSGHLMSLIEAGKRLLGHGAGGGDGLGREFTVTVLVVRPPTPESAAEVGAHVRRVAESGIAGVRFHHLPAVEPPADCAGNLQEFKSRYLELHRPHVEAAARELGAAALVVDFFATAVLDVARGLAVPAYVYFTSTAALLALTLRLPALAETVAADFETFEGTVDVPGLPPVPAASVPGFLGRKDSPNFTWFVYHGRRFMDADGIVVNTVAELEPGLLAAIAGGRCVPGRPAPPLYPIGPVLNLGAGGGASGDEACVRWLDAQPRASVVFLCFGSLGWFDAAKAREAAAGLERSGHRFLWALRGPPAAGSRHPSDADLDELLPAGFLERTRGRGLVWPRWAPQKAVLAHPAVGGFVTHCGWNSTMESLWHGVPLAPWPLYAEQHLNAFELVAVVGVAVAMEVDRRRDNFVEAAELERAVRALMGGGEEGRKAREKAHEMKAACRKAVEERGSSYAALERLRHAIRKGANTATAHFKAPQPLI

SEQ ID NO: 3307 - protein, 286 aa, Zea mays
MALLPQILHSPHPALAAAASSSRAFCRAPRHLHVSASRGRGRGRLATAAGASGPGPSSPEPSPPESDDGLVELPLFPLPLVLFPDATHALHIFEYRYRIMMHTVLQTDLRFGIVFVGNSGSAAEVGCVGEVVKHERLADDRFFLICKGQQRFRVARIVRTKPYLVAAVQWLEDRPPAEPPAPGEDAEALAADVEALMRDVIRIANRLNGKPEKEVGDLRRGLFPTPFSFYVGNTFEGAPREQQALLELEDTAARLRRERDTLRNTLNYLTAASAVKDAFPSSPSSG

SEQ ID NO: 3308 - protein, 390 aa, Zea mays
MVLCFKLLFGPTAAIFLSAVVILSCFTNVPQLQLSLKYTGELDSSYVAPAPVPKCDIFRGEWVPDPAPPQYTNETCDFIQEHQNCMLYGRPDLEFLKWRWKPDGCDLPRFDPHRFLQVVANKSVAFVGDSLARNHMQSLFCLLAKVEKPKDVSVTDRADPNMILYYEGYNFTMYLFWSPFLVRSEEDVAGVFKLYLDEPDSRWLSVASQLDYVLLSGANWFTRQSYFYEGGQLVGGVYVPLNFTSSLTNQHSHRMAFRTALRALAGARFRGKVILRTLSPMSHFEGGAYDAGGDCRRTRPYRADETAPMGGLELEFYTSQLEEFREAKGLDVVLMDPTAAMLMRPDGHPSRYGHWPDEKRTLYNDCIHWCLPGPIDAWNDMLLHMLSHSS

SEQ ID NO: 3309 - protein, 449 aa, Zea mays
MKWNGTGAFVAGRLPGRQRPARRAQLRARGRAPDRGQPQHVRHLLLLCDRSPALLSSPLFHAIRRKWHIWKLERCCVFLPKRCARSSALLSFTLLTSTTIGGLIYSLNLQIREYLPMGGSVKMIEESLKLAYGEDSDFIKDKRIAAVQALSGTGACRLFADFQKRFLPDSQIYIPTPTWSNHHNIWRDAQVPQKTFTYYHPESRGLDFSGLMNEIKNAPDGSFFLLHACAHNPTGVDPTEEQWREISHQFKVKKHFPFFDMAYQGFASGDPERDAKAIRIFLEDGHQIGCAQSYAKNMGLYGQRAGCLSILCEDEMQAVAVKSQLQQIARPMYSNPPVHGALVVSIILSDPELKSLWLKEVKGMADRIIGMRKALKENLEKLGSPLSWDHITNQIGMFCYSGMTPEQVDRLTNEYHIYMTRNGRISMAGVTTGNVGYLANAIHEVTKPN

SEQ ID NO: 3310 - protein, 87 aa, Zea mays
MSSRRSRASTVSEEEINELISRLQTLLPSARRRGGSQASTTKLLKETCSYIKSLHREVDDLSDRLSDLMASMDHNSPGAEIIRSLLR

SEQ ID NO: 3311 - protein, 564 aa, Zea mays
MQLEAMDGNNKRARWMVGAALTAVVVVVVTTVLILGGRNVGGAPATARVWAAVASFRQGSIDLSSSPPAAARHDDRLYNGLLTDSFDEESCHSRYQSAMYRGKPGRRPSAYLISKLRRHEALQRRCGPGTTAYSNALEQLRAGSMSTIAPPECAYIVSISYSGLGNRILAAASAFLYAVLTDRVLLVDPSNDMDDLFCEPFPGTTWLLPPGFPVANYTGFGVDTAESYGNMVRNKVVVESGGVADAASTAGRRLPLPAFAYVHLHNDATVEDNYFFCDGDQRLLRRVQWLAVRTDSYIVPGLFLVQAFQGELDRMFPERDAVFHHLGRYLFHPSNHVWGLVTRYYDAYLATAQQRVGIQVRVFGAQPNSPELLEQITSCTQKQKLLPELRLATGEPTPPPPPVPASRARSKAVLVTSLKSWYYEKLKSMYWEHAAATGEAVSVHQPSHEEYQRSGARSHEHKAWAEMYLLSLTDVLVTTGVSTFGYVAQGLAGVRPWVLYKSTNSSAVPDPPCGWDVSMEPCFHKPPSYDCRLKQWTADISKDVPYIQHCHDLTWGLKLVGRNK

SEQ ID NO: 3312 - protein, 508 aa, Zea mays
MGSQGQAATNGRGDDTGGGRTQQAAHFVFVPLMAQGHLIPAVDTALLLSTHGAVCTVVGTPASAARVRPTIESARQSGLPVRLLEFPLDYAGAGLPEGADNMDNVPPEHARRYFDAVALLRAPIEAHLRAHARPYPTCLVADFCHPWTTVLAANLGVPRLSFFSMCAFCLLCQHNVERFGAYRGVAHDDEPVVVPGLERRVLVTRAQASGFFREVPGWEDFADYVERARAEADGVVMNTFEEMEPEYVAGYAAARGMKVWTVGPVSLYHQRAGTLAARGRATDVDVDACLRWLDGQEPGSVVYVSFGSIAQADPRQAVELGLGLEASRHPFVWVVKSVDEYDGTVRAFLDDLEARVAGRGLLVRGWAPQVLILSHAAVGGFVTHCGWNSTIEAVTAGLPVVTWPHFTDQFLNQKMAVEVLGIGVSVGITEPLMYRKVEKEIVVSRNVVEEAVRSLMGAGEEADERRRRARALAVKARAAMQEGGSSHRNLLDLVGRFEGVMTKDTKGA

SEQ ID NO: 3313 - protein, 1280 aa, Zea mays
MDSIDADLARTQEERRRMEEALAAGAPMAVSSVTFDTDLYGGGGADPNRFAGYDTSIPASEDDAAEDDAEAANPAPRRLAAYTGHAIAAADIPRSADDDDGLPKRSQRIIDREDDYRRRRLNQIISPERHDPFAAGEATPDPSVRTYADVMRDAALQKKKEDLLREIAKKKKEEEEKEKERKAAAPEQPAATTKRRNRWDQSQDGDAGAGAKKVKTSSDWDAPDATPGIGRWDATPGRVGDATPSVRRNRWDETPTPGRMADADATPAAGGATPGATPSGAWDATPKLPGGVTPTPGKKQRSRWDETPASMGSATPGSLGAATPAGYTPGPTPFGAENLATPTPSQIARGPITPEQYQLMRWERDIEERNRPLTDEELDAMFPQEGYKILEPPASYQPIRTPARKLLATPTPLGTPLYAIPEENRGQHFDVPKELPGGLPLMKPEDYQYFGTLLNEEEEEQLSPEEQKERKIMKLLLKVKNGTPPQRKTALRQLTDKAREFGAGPLFNKILPLLMQPTLEDQERHLLVKVIDRVLYKLDELVRPFVHKILVVIEPLLIDEDYYARVEGREIISNLSKAAGLATMIAAMRPDIDNIDEYVRNTTARAFSVVASALGIPALLPFLKAVCQSKKSWQARHTGIKIVQQIAILMGCAVLPHLKSLVEIIEHGLSDENQKVRTITALSLAALAEAAAPYGIESFDTVLKPLWKGIRSHRGKVLAAFLKAIGFIIPLMDALYASYYTKEVMQVLIREFQSPDEEMKKIVLKVVKQCVSTEGVEADYIRNDILPDFFKHFWVRRMALDRRNYKQLVETTVEMANKVGVADIVGRVVEDLKDESEPYRRMVMETIEKVVANLGASDIDARLEELLIDGILYAFQEQTSDDANVMLNGFGAVVNALGQRVKPYLPQICGTIKWRLNNKSAKVRQQAADLISRIAIVMKQCQEEQLMGHLGVVLYEYLGEEYPEVLGSILGALKAIVNVIGMTKMTPPIKDLLPRLTPILKNRHEKVQENCIDLVGRIADRGAEFVPAREWMRICFELLEMLKAHKKGIRRATVNTFGYIAKAIGPQDVLATLLNNLKVQERQNRVCTTVAIAIVAETCSPFTVLPALMNEYRVPELNVQNGVLKSLSFLFEYIGEMGKDYIYAVTPLLEDALMDRDLVHRQTAASAVKHMALGVAGLGCEDALVHLLNYVWPNIFETSPHVINAVMEAIEGMRVALGAAVILNYCLQGLFHPARKVREVYWKIYNSLYIGAQDALVASYPALEDDGDNIFSRPELAMFV

SEQ ID NO: 3314 - protein, 1002 aa, Zea mays
MKLQHETSDAEVLVSAASRNLSSSSSAFVSANQSPFFTPRSLSARVPEHTDPENNCSSNGIVLKISDILSGDSFTPQEELPSASVGVLPSDVSPPISLCTSSNFGTPAIVYNNPSFVSTFNGPCQGSSSATSNGGRSAPKEKHKRLGGIYRKSSSCQPTTSSASVSRLRSYDVYVGFHGRKASLLRFTNWLRAELEIHGISCFVSDRSRCRNSRSHDAVERIMNASTYGVVILTKKSFGNPYTIEELRNFFGKRNLIPIFFDLDAADCLARDIVEKRGDLWEKHGGELWMLYGGMEHEWMESVDALSRVVDVQLEANDGNWRDCILQAIILLATKLGRRSVVDRVYRGKGRLEKEEFPFARNNDFVGRKKELSELELILFGDVMGDGEREYFELTTKQRRKGLAVRRSANNHEHMNTDDSKGKEPVIWKETEKDIEMQRLGSPLWHGRPLRVKNGVRCGRKKRSRKILYGKGIACISGEPGIGKTDLVLEYAYRFFQRYKMVLWVRGESRYIRQNYLALRTFLEVDLSVDSHLHEKGSDRCFEEQEEEAIAKIRQELMRDIPFLVIIDNLESEKDWWDKRVIMDLLPHFGGETHFIITTRLPRVMNLEPMKLSYLSGAEAMTLMKGGVKDHPLVETDALKIIEEKLGRLPLGLSIVGAILSELPITPTRLLDTLNRTPLIRNFSWNDREVLSLKNHEILVRLLDVCLSIFDHADGPRSLATRMFQVCGWFAPSAVPIHMLARAAHKVPKKQWRGPRWRKWWRPLTCGLATSRMKKSEAEAAAMLMRFGIARCSAKPEHVQFHDLIRLYARKLGGTRTAPAMVQSVYLQGSIKHSSEHLWASCFMVFGFGSDPLLVELRPSELMFYVKQIVMPLAIQTFITYSRCNAALELLRLCTDALERAAESMLAHAGKWRETSFSCFRQAHSEAQYTYLWQELALLKASVLETRAKLMLRGGQYDIGDDLIRKAIFIRTSICGEHHPDTVSARETLSKLTRLLTTVQLS

SEQ ID NO: 3315 - protein, 453 aa, Zea mays
MVRWGEMVEEEEDDEYAKLVRRMNPPRVVIDNDSCGNATVIRVDRVNKHGILLEAVQVLVDLNLVITKAYISSDGNWFMHVFNVTDQDGSKLHNREVIDHIQKCLESDGYLVPPANGYALPEDQFTSIELTGADRPGLLSEVCAVLATLSCNIVKAEVWTHDGRTAAVIQVTDEATGRAVHDAGRLSRVQELLRDVMRGDGTCNRGGTGISAERRLHTLMLDSVGGGGAEEAGGGRDESGGCGVARPKVVVMDCAERRYTVVILRCRDRPKLLFDTLCALADLQYVVFHGTVDAEGASKDKEAYQEYYIRHVDGHPVRSDAERARLVRCLEAAVERRASNGLELEVWTEDRVGLLSEITRVFRENSLSIIRAAITTRDGKAEDTFYVSDAYGNPVDGRTMDAVGEQLGHAVLRVKRGGHDAPVKHEAEGGAVSVLGSLLKSSFQGLRLIRSYS

SEQ ID NO: 3316 - protein, 133 aa, Zea mays
MEQESACNLGRRKMNSSERWIGLGSCKALEERAEIGAPSAFGVEIKGGGWGRRHDSERARDGEGRTGGRQRWQASGARSEENGDVRLCGWAWVRRLLAGAAAPETGCVGRGWRRVGGVEAGAYTGVDAHTAVL

SEQ ID NO: 3317 - protein, 201 aa, Zea mays
MAAAACSSASPLLLPSGPRHASASRAWFLGGRSRALRSEAPCCCKAAAARGSAPQCGTVGGGSSSTRRGLLGVALGASALGLAAFDAVAAGLPPEEKPKLCDAACEGELENVPMVTTESGLQYKDIKVGEGPSPPVGFQVAANYVAMVPTGQIFDSSLEKGQPYIFRVGSGQVIKGLDEGILSMKVGGLRRLYIPGPLAFP

SEQ ID NO: 3318 - protein, 165 aa, Zea mays
MSSSDPDDAPDGGEDSPLFRRSGGPSSGGTVGDVPVSQSLIKAASNVCFSLFVLAVLVVTVVAVTYQPPDPWLQSSAAITTSLSRVLPNSTFLVPDDSLLPTGEDFNSSTAVPAPVRDEDDAAAAVSAASAAAAGNRTCDPDSRRGGGGGGVLRACASRRAACVW

SEQ ID NO: 3319 - protein, 92 aa, Zea mays
MLLDMLGARSADVVCSVDMDCAVDFMPLLDYTEELAPTAIQGSNEPLQPARFPGTRRRVDGKPVELPTPSPTAVSVVASICPYRRYLVAKSI

SEQ ID NO: 3320 - protein, 811 aa, Zea mays
MEPAGARKEWRAVPGSSLRSNGAEDAAEHGKLGQSEDRAIYEEGAGGLEDFCAITIDGSGGLSEDILQQRLQSVVRQREQLQQVEMELRAQAIAHPQIIQAQQSFQATSKEHAAAVAKIKQEQLHEREQYILELEMKLNDKDRELNALKIDHQTVWANQDLIREQTKELATVRRERDNSEAERAQHLTQIHELQEHLREKESQFIALEEQHRAAQDNILYKDEQLREAHAWVSQVREMDALQSQSLQVELRERMEQFNQYWISSQQQYAEMQRSLLHTIQQLQQELTEAREQSGAQKDGPQVSREGSAESSLVQSMGNSVASNGSATADGNQQLLKNNGSVDVSVQANSASAVPVPSSLLGIGGPAAHIAAMHAFMIHPQGIPQPLVASPNSGVPQFGSFQSQSTIQPNSQWPNQQEVQNVSQPQDETNYQTSQSDRTVLQQGAINTDELSSKPSQDSQPDHLNAHVKQQQSPASAPTESTHELTVVEANVAEHVSCDEQQKILNEQDSLSNMNNHIGIVEHLEQNTESKDERAASDKQPEPVSRQHKHLNFPPFTTQIHLKKSATENPNVVNQVDIMKSVAGGFSSQLPRAPKEPSLLDERSLLACIVRAVPAGTEGGIRISSTLPNRLGKMLAPLHWHDYKKQYGKLDDFVASHPELFVIEGDFIHLRDGAQQIISATTAAAKIAAATASSASYSSLLPSVAVTPVAQNTRQKRRPAVDSRSSNAIPSGNGFTDQFNIIQGVSDVTISGKVRNIQDNGFIDEVRTGQPSVLTAATANGARHDKCANNTRHGYGGKQQGRTTGTTYLSRR

SEQ ID NO: 3321 - protein, 378 aa, Zea mays
MMRANREQRVAFSSTKEAAAVPKEEVWEVRPGGMLVQKRSPDADPPPGGAPVPTIRVKVKFNGVYHEIYINSQASFGNNASSSVLRLCMCCSCFFLLSEFEPVNACSCRRAQEAAVGEDGPAPGRPEGGVQGQGEGLQGVPGHGRRQGPLQDGHARGPRRQGQAPPRGAPDRQGRARRQGHRPRRPRRRQARNQGVGAGDDREQGRQGRGRGRGDADRGADERAGEAGLRRRRRGGEGGAAGAGEAGAEVRGDAGRHPRQEQGGGGGGAGQGPQRQQQGAAAAPAPGFGARASEPAAAPAVPAAGAGVADPDGELGDVRPPVVSAVDVGGPRDDHGPRDQHHAVPALRLGALLDGSSRRQPATPPWPGPHLSPLVCLS

SEQ ID NO: 3322 - protein, 141 aa, Zea mays
MEINRAQPWRLHRVTTWGRARAGLSVVGKEMGKKTGASALGTGRRAEGQRRAVLGEPTTAQRIRGRGCSHAQGGAEDGRARTFLVAGELKKMKLGRYMESRASTSGVLDMEAKEGRSALGRQKMAAGGNHLREGVAWKDLG

SEQ ID NO: 3323 - protein, 782 aa, Zea mays
MVNTGRFVVLVLAYRLLVPLLSGSAEPDHTTKESYVVYMGSPSGGGDPEAVQAAHLQMLSSIVPSDEQGRVALTHSYHHAFEGFAAALTDKEAAALSGHERVVSVFKDRALQLHTTRSWDFLEVQSGLQSGRLGRRASGDVIMGIVDTGVWPESPSFNDAGMRDVPARWRGVCMEGPDFKKSNCNKKLIGARFYGVQPESSASNASSSAVATPAATGSPRDTVGHGTHTASTAAGAVVSDADYYGLARGAAKGGAPSSRVAVYRACSLGGCSASAVLKAIDDAVGDGVDVISISIGMSSVFQSDFLTDPIALGALHAHQRGVLVVCSGGNDGPNPYTVVNSAPWILTVAASSIDRSFQSTIALGNGDVVKGVAINFSNHSLSGEQYPLVFGAQVAAHYAPVAEASNCYPGSLDAQKVAGKIVVCVSTDPMVSRRVKKLVAEGSGARGLVLIDDAEKDVPFVTGGFALSQVGTDAGAQILEYINSTKNPTAVILQTEDVGDFKPAPVVASFSARGPGLTESILKPDLMAPGVSILAATIPSTDSEDVPPGKKQSAYAIKSGTSMACPHVAGAAAFVKSAHPGWTPSMIRSALMTTATTTNNLGKPLASSTGAAATGHDMGAGEMSPLRALSPGLVFDTSTQDYLDLLCYYGYKEQQVRKISGAARFSCPAGAPSPDLIASAVNYPSISVPRLKRGRPATVARTAMNVGPSNATYAATVDAPPGLAVRVSPDRLVFSRRWTTARYEVSFDVAAAAAVSKGYVHGAVTWSDGAHSVRTPFAVNVL

SEQ ID NO: 3324 - protein, 415 aa, Zea mays
MAAPAAAKRPYWQAPATAAGAAEPNKRHRTAAAPAHMDAEPEQEEQPLLPGLPDHLAQLCLAPLPPRLLHAVCRPWRRLLYSPSFPPFLALYAVLDDAAAFAGSGVSFAAYDAVAGRWDELPAPPMPSPPPRLWHPAFLSRRLPLQSVAAGGRLVLVAGSTRALAPALPRPVVFDPAARSWRLGPRLPFAPRRWCAAGAARGRVFVAGGVGAGYDASDARSGATWDPAADAAAAAAWEPIPPMRDARFSRDAAEAVCAAGKVCMVSLRGRGAKEGAVFDLRAARWEDMPPGMLAGWKGPAAAAAAGGDEDETTIFVVDEERGALSAYDWAGDRWRTVVESERLKGAAEMAAGGGRVCVAAQGGDKVLVVDVAPSRPRRWGAPAAAELRPRVWEVAAPPGKRVVALHVLPRMARAD

SEQ ID NO: 3325 - protein, 638 aa, Zea mays
MGRRKKSKEMEKKPLDILSGSDEDFDSGENLSKIQINEEYARRFEHNKRREALQRLEERRKQGLVPASDDDESESESSSEEEDEAAAIASRLVDRRMFEVIRRIRSGDPRILDKDAKVYSSEEEGGEEGEDAKKQEESKQEKEKTKKEKPLYLKDVNARHLLEEGPEFAAQPSRSSSKFERIAYDEQQKKGLEAFLEAQKEALGDGGDDDGDLFQVKEKARAGADDEAEEDEEEKQTKDLAGEVFGKDEELDENEKFLKEFFLKRPYLETEKSKSYLDNIQELSDEEELEIQEEYEHAYNYRHEEAMASGAVVADRVLGHSRVVEGSVRKKESSRKQQRKSKEERMARVKQEQAEELKHLKNLKKKEIAEKLERIRMIAGIEGDAACKLGADDLEEDFDPEDYDKKMQEMFDDSYYEADEVDPEFGSGEEMDLEKPDFGKEDELLGLPKGWASDHSKEESTATDAKGEKGKISLKDKVELEKEMEEYYKLDYEDTIGDIKTRFKYKQVKPNSFGLSTYDILASDDKDLNQYVSVKKLAPYREDEWKVTHHKKQSKDLILGGQKKEGKKDKSGKKSRSEEDPSSSKTENDRMTNGQESTDAKKKSTRSERRKRRKSELRPSSDRLEAYGKINSKRHKSH

SEQ ID NO: 3326 - protein, 349 aa, Zea mays
MILHSELKRQRKLVKNLKKKSLWSRTLEEIVEKLVDIVIFLHKQIRDSFNETGTDFCASEQTQNKRLGSCGLALHYANIINQIENIVSRPLSLPPSARDNLYHGLPITVKSALRSRLQTYNPEEERTVAQIKAEMQKTLRWLLPIAENTIRAHQGFGWVGEWANLGSDMSKKSGSQHSVTRIQTLHHADKAKTEHYMLELVALLHHLVIQVKNRGYGTSKSSRHDASSRSRKAAATDLRPETETRHNTSPVNSRTASSPLSDCERAALDHLSFRRTAYGRSQSCEPPPGHRRSKAHRSWDPCRSHGSSPATEFGRTPAVQQRGRGRDLDVIDGLDRLPSYSHPPSPTFC

SEQ ID NO: 3327 - protein, 367 aa, Zea mays
MAKESKLTAGVAAALTVVAACALCLLLPATARAQLRVGFYDTSCPNAEALVRQAVAAAFAKDAGIAAGLIRLHFHDCFVRGCDGSVLLTVNPGGGQTERDALPNNPSLRGFDVIDAAKTAVEQSCPRTVSCADIVAFAARDSISLTGSVSYQVPAGRRDGRVSNATETVDLPPPTSTAQSLTDLFKVKELSVEDMVVLSGAHTVGRSFCASFFKRVWNTSTNPATAIVDAGLSPSYAQLLRALCPSNTTQTTPITTAMDPGTPNVLDNNYYKLLPRGMGLFFSDNQLRVNPQMAALVSSFASNETLWKEKFAAAMVKMGRIQVQTGTCGEVRLNCGVVNPSSYSSSSAVELGSSAPAAVGEEGYAAS

SEQ ID NO: 3328 - protein, 573 aa, Zea mays
MTYFPGEVVEHIFSFLPSHSDRNTVSLVCKLWYDVERLSRRGVFVGNCYAVLPERVVLRFPNVKALTVKGKPHFADFNLVPPDWGGYAGPWIEATARSCLSLEELRMKRMVISDENLELLARTFPKFKVLVLISCEGFSTDGLAAIANHCKLLRELDLQENDVEDRGPRWLSFPDSCTSLVSLNFACIKGEVNSGALERLVAKSPNLRSLRLNRSVSVDTLSKILERTPNLEDLGTGNLTDEFQAESFVRLTSALEKCKRLRNLSGFWDASPIFVPFIYPLCHQLTGLNLSYTPTLDYSDLTKMISRCVKLQRLWVLDCISDKGLQVVASSCKDLQELRVFPSEFNVAGAFTVTEEGLVAISSGCPKLSSLLYFCHQMTNEALTTVAKNCPSFIRFRLCILEPKKPDAMTGQPLDEGFGAIVRDCKGLRRLSMSGLLTDRVFMYIRMYAKYLEMLSIAFAGDGDKGMMDVMNGCKNLRKLEIRDSPFGDFALLGNVAKYDTMRSLWMSSCNVTLKGCQVLASKMPMLNVEIMNELDGSSEMENHGNLSKVDKLYVYRTTAGVRDDAPNFVQIL

SEQ ID NO: 3329 - protein, 620 aa, Zea mays
MAKEQDGSPKVRHPEFQRMRVTLTIGVIGLCVTAYILGAWQGTSNGISSPLISTRTQCKDPVRSSGARLDFQAHHQVGFNESALAVEKFPPCQLKYSEYTPCQDPRKARKFPKKMMQYRERHCPKKEDMLRCLIPAPPNYSNPFQWPKSRDYAWFNNIPHRELSIEKAVQNWIHVEGDLLRFPGGGTMFPHGADAYIDDINALVPLNEGNIRTALDTGCGVASWGAYLMNRNIITMSFAPRDSHEAQVQFALERGVPAMIGVMGTERIPYPARAFDMAHCSRCLIPWNKLDGVYLIEVDRVLRPGGYWILSGPPIHWKRHYQGWERTEGDLKQEQDEIEDLAKRLCWKKVVEKGDLAIWQKSINHVECVDSRKVYDAPQICKSNDVDSAWYKKMDTCISPLPDVKSEDEVAGGVLETWPKRAFAVPPRVIRGSVPGLTPEKFQEDNKVWSERVDHYKKLIPPLGKRRYRNVMDMNAGIGGFAAALMKYPLWVMNVVPSGLAHDTLGVIYERGFIGTYHDWCEAFSTYPRTYDLIHADKVFSSYQDRCDITYILLEMDRILRPEGTVIIRDNVEVLVKVQAITGGMRWKSQIMDHESGPFNTDKILVAVKTYWTGKLVQKQ

SEQ ID NO: 3330 - protein, 680 aa, Zea mays
MPIEMSTSVLRPRLVSSHASRHGHAPALNIASRTLCALLRLRTPTLASAVQQMPACALALPAHAAPPTTPRLTSLSLLPSAALAVLPPTSLSLSLFAYKQALSHTPHSAFSLSLSLSLSLSLYIQSGKNAPKRKAHTTHLHSSLLSSPSSILSLSSPLPSQQIDLAGNERAIEPGEGSATRATEQRRRRRRQSSPPGAEAARAAQAAMGAPVNGAVVLFLLLLAGTGAVTEETAPQEPTLPAAGSGSGSGAGAGAAVGVNSNSVLVALLDSHYTELAELVEKALLLQTLEDAVGKHNVTIFAPRNEALERDLDPEFKRFLLEPRNLRSLQALLLYHVLPSRLPSGSWPAAPHPTLSGEDVELASAGAGGMRVGHAAVTRPDAVLRPDGVIHGIERLLVPRSVQEDFNRRRSLAAISAVLPTGAPEVDPRTHRLKKPAPPVPPGAPPVLPVWDAMAPGPSIAPAPAPGPGSGKHHFDGHSQVKDFIQTLLLYGGYNELADILVNLTSLATEMGRLVSEGYVLTVLAPNDEAMARLTTDQLSEPGSPENILYYHMIPEYQTEESMYNAVRRFGKVRYDTLRLPHKVVAREADGSVKFGQGEGSAYLFDPDIYTDGRISVQGIDAVLFAPDDAKATQTADPNRKPPAIVTHKKKIKLRRGKLLEATCQVAGLFGQRSRFASCQ

SEQ ID NO: 3331 - protein, 818 aa, Zea mays
MSSTGAGDDMPPVASVNTPACTSVSMDMNPVASAIAPYTEGVSVTPPAALRAPGHIDEQTKTADMVGIEKHILMRHIGPHEQDTPHILQSHPDNIDIRLIPKVGMTFSNVDEAYNFYSQYAYEVGFPLKKYRERKNCKWLNCSMEGKNAERKDTEKGQLQCNKTHDREYMEFLSAMQESRIPQHCIMDFVTEMHGGPENVPITVQDMSNLKKAWQRERNANDVSKLLSFFSLCKKDNPQFFSDFPLDKEGKILSIFWSHASQQAEYIDFGDAVTFDTTHKTNMYDKPLGMFVGSNHHLQCTIFGFALLGDETVDTFEWVFNTFKTCMGCDGPRVMLTDQDPAMPIALGRVFPNTIHRLCLWHVQNRYMPHLNELYARFEDMDFKTRFQSIIHHPLNEMEFEAAWQMMLDDFQLHENNTLARLYEIRKDWVPAFFKGDYCGLMVSTQRSESMNKLVKSAHVDANTPLHQFAKQMMKLLHSRKMKEAKEALGCMGQKDTTTLYMFEIRVARAYTRAVMTRFQETVKYATAYRIDRDTEGDEHDWVVYFVFILYALSCIYKLKGSRVSIFCNDTHTPHQDVAFSRDDRNLKGKDGETRSYRQKMLLKKAMKVVHHASLSKAGNDKALEMMDELLGLLMRVEPDIGTGESCGTSVCDDIQEILMGSNTNECNTKDDQCNMPILTLEHNTDIRLVDSSSMDVEARKKLEFHMEGVNLARPDKAKPKGRTIKSSEQQVLKLGVKGAKKMSRKCQKCGITDGHNSRTCLTVEDNRVRLANLSGRKRERPPGSRNKIKAVAPQWNETSTSKKRTVDVGDDDSSRRE

SEQ ID NO: 3332 - protein, 480 aa, Zea mays
MPPKSKKSVKGLFKGLGLFQGSSSSSSRRRELLSVVHGDEDEQHTEEQHIEEEQHNEAEQHNEEVEHNEEVEHVTWDQVAQHHQPWDQWDHQREQQQVWDQWGQQGEPADNPMDDGSGGSSATRTRRSRKSHSVKPRHAIEREADRNLIMPHGDRNWEDLSFDGKGHHTQVNITLSSLCRLHYPGIVKVSNGDTEDEVLVSTWDKYKFKKERNHTDRQGLVRNDFWLRYRLSDGEDYMGHAERVFQNNAKKLVKDAIYYARIQATNLYFQKHPEEAGPLNKKEWSSKIYLTEDQYREVMVPWMAPVPDAYYAWCRYWASEGFQKVSAHHRQCRGTNPNHKFGGDDMIRKAKRMEATSGQKPSDIEVYQEGHKGPDPNNPYQLCSQTATNRLLMQQQGMATNFPPPPQWSQFANTPVPPPQFNTPPTHIPAPGDRVTSEAGGSGSDSAAGTGFVDSLFAFPSPCGGGGSGQSSNHPSGGYL

SEQ ID NO: 3333 - protein, 184 aa, Zea mays
MLVVSKSSRKQAQRKQRIAHLVELNGRCLKWLARGHFVRFCKQGTRCFCCKALGHRSYNFPEGDSLQATRHAVRVLVWEWLTPEFFREPACHGFVLRTSVWLRLKDHVGRRVLKPNAVWRLKDHAGRRMSKPNAIWKRISPSGVEIGGSWCVVSEVAAPSNGLHQQGQNPVSAEPRGDDLSPRP

SEQ ID NO: 3334 - protein, 370 aa, Zea mays
MSVASPASPTSPPAPAPPSRVIVSHRVPLRALPDPTAPFGFAFSVDAGTVAYQLRSGLPANAPVLHIGTLPAAAAEVASDELSDYLLAIFSCFPVYLPTDLHHRFYHGFCKHYFWPLLHYLLSLTPSSLGGLPFQRTLYHSFLSANRAFADRLTEESTALGDDSPKRSVIVLSKFVSCSPSLSSAIRVNPWSVESVEEAMNAALRMPEAEQLTTSSYDSLDSSFLQTRDKLELKAMKDGSANYATLEKKAKLYEKLSRGELPDEEDKEKYCVDFFQKGFDRVYEPQIPECSHRATDGAEPVNDHEDSMPNAKPLDLGRAGTTIDRDEHKRFVREVHEEVTEARQKASTNMEVAVERSLWSLSSGRDRWIG

SEQ ID NO: 3335 - protein, 955 aa, Zea mays
MASPLPPPPPPPPPSHAPNPPTSTHHPCPSPASTPEPATNPENSLGVPLAPHVGRLKAQRWSDTSPVSSSGDSWLAPQSYKEALLAYPLAPAAPPPAPSVKPVYSAKAVADSLPVVQGRRAGPRHDDDGWQVVRSKRRQFRGVQLPRREPPVVLRGRLGHQAAKCPGRLEVQRKKTVWQRLEKQQSKVSVWQRLSEQREDSPVASQRADPCRRRSVWVQISRPEAAAMKEDPPRMADDGESHRSLRYKRKRRRSKHGKGSSRSVVAPGQALSASSEDEVPPSIRQTPVQWDGDQGERNWGALSSCTLEFSDDMAREEANMRRALFVTIVGTRPLVMGPEILEEVAHSFNVKLEDMKIHHTKPEDFLLILPDEDTASRVLNGGKILRGPRFSLIFKRWTRCSHASSSIMSGLVDLEIRGIPEHAWALSTAKSILIDSCLIAEVHPVTLLKQDLSSFVVKVWCFNPEKLQRDSVLHIIEPGLQMFEKRCLTYKIQVSVLRAGSSITPADPTSSVAGGKSPGDEDGNGTQDPHPRRPGGSLVQRRPLHLRLGPQSSSGRGNEAPAQSCALKEVAGDAGRDLHLTLGTDMSPTSEVRTLHLRQAPQPSLGRDFEAPAPPYASRENSGDTLRVMQLMPLTTEEPLHAEALPEASPHIDGAPSPDFEVAGQVTMEKRNSPQGCYSAVHESGGVTSRLVINGPVRFLRPDPACCLVGSLETSGPVPVSPHEPAGPLETCNSLPVSPQLCSGPLKTNTLMIVSPQLVSGFPESSFPSAVLPLQMLGMAGRMAVTVRHNEATKALKVYFRRRTKAHPLQISQNEETEASIIQTNNTSHSDSRPLNQSLSGKEEFLRKISKAADEILPAPKQAMNTSSAPQSSQVAAPRRSRRIAGAGVEFNMRDWGNRSTKKAMRALHILSDDNGTTQEALDAYAKIFKQPLSHNQVEALAALFGWTPPPGLVC

SEQ ID NO: 3336 - protein, 501 aa, Zea mays
MGLRSPLVLLLLLLFLAATFRPSAAALAPPTGSIVKQLSSVVRWPRAAPSTHGPKQPGHPQYADGHVGVALQFESGYFVETLVEGDKLGVTPHTVRVSPVEGGELLAVDSAHSNIVRITPPLSEYSRGRLVAGSFQGHSGHIDGKPSDARFKRPTGVAVDDMGNVYVADTANLAIRKIGESGVTTIAGGKSNIPGYRDGPSEDAKFSTDFDVVYVKKMCSLLVIDRGNAALRKISLPQEDCTYQDSALLSSDLILVIGAVVAGYIFSGFQHGFGFSGSEKVEAPENEQHESSTIGKPPLVVESLKEEPGAGWPSLGTLIADLLKLAIEGVGKLLLSVVPQRMQHGKRKTDLTPLRDRLVMPEDREETAAAAQKLSSTPMRPETAHAPNPVTETAAPKAPKSTKPSKLRDSSTLSSKHRSSKRQEYADFYGTSEPAPVGAAAKVPKDRLRHRHHHREKSGEVAYGAAHHDLKPAEAKPADYSDPSYDPYVRSKYAAESGYRY

SEQ ID NO: 3337 - protein, 438 aa, Zea mays
MESLLQSQGVAAALLPASRPRPRRGNRLRRRTRAQANIRHLVSVDDLRQVARDAATVGCGGADDHALNGRAPVETPTPEVSRGAGTVAQRLRAIAEACADRADMHDIIGRQRDNWNHLLLHATNSLALTASLASALAPASPTLPALRASAGVLLATAAVTMAAVNRMQPSQLAEEQRNATRLWRQLERDVRAALDHRTATTAEADDDVQEAMDRVLALDAAYPLPLFPGMLDKFPSAVEPTRWWPRRQPRKRPAQSAAKTVNGATASNCNGWTRELEDEMRGIVRVLRAKDEQEYVSNAKLALRLNRGLAVAGPALAGTAALATAFIGSSGEAGSLAPGAAVLCGALAAAVNTLEHGWQLGMLFDLFRNVAGFYRKIQEDIEACLDEVDVERRENGEVFQTKVALLLGRSTSDLSHFREMASPSFKDEDIKDFAGKLF

SEQ ID NO: 3338 - protein, 263 aa, Zea mays
MDEEGQRTPQPMVVARKRRQATPDHPPYCWMIGEATDALAEDGGSEEDSISAFIRARHPGVPPAHDRLLRHYLGKHVAEGFFVRTATGRFERSPQENADEEELPVEQADQAGSCKPASVGSSVVLVEAKPKRGRGRPRKDGSPSTLAVAAMSSVAVAGKDEIHAPSLKPKRRGRPRRQAGADHRDKEHEPPRELALVILGDSSAAPIMDKPCTTLVPPTTPPVDGGQPIDLALATTTEVPVPEPAATPAMDKDGADADASSIE

SEQ ID NO: 3339 - protein, 314 aa, Zea mays
MAADSSMGFHQGITASLYNHHMLSFQSNSDVGIGGGDDATGGMVMAPGSVSGGSGNAGLFLSPNTGVVGNAPGVAPLMNSSGDAFRGTGTPKYKYVTGSPSDWSDREVDILNEGLVRYAREPSIMRYIKIAAMLPNRTIRDVALRCCWATQGKERRKKPDGFYTGKKMRDVKPIQDKMVASVPIANFHMTPTTNVIPFSVSTQHPNQQSQVPKEAPVVDSATQRLLEENNQLLNQISANNETFKTVENTDLFLRTSNNIKTILSRMSETPGIMSQMPPLPLSINEDHINSLIQLNRLVASYGTTSISHHTKQEP

SEQ ID NO: 3340 - protein, 537 aa, Zea mays
MAGVSGRGAAERVAAAVEAVGSGGWEFRNAYRRQLLALSRRIRLLGPFVEELREVPCVPAVEPERALAVLADALEEALDLLQLGRDGSRIFLVLDRDKVMKKFHESIVQLEQALCDFSYDKLDISDEVREQVELVHVQLKRAKERVDMPDDEFYNELLSLYNKSHDPSAELDILGRLSEKLHLTTITDLTQESLALHEMVASGGGNDPGEHIEKMSMLLKKIKDFVQTQNPEMGPPMTTKLMDPNGEPRPRNIPDEFRCPISLELMKDPVIVATGQTQERAVTALLNLSSHEYNKTSIISSGAVPGIVHVLKNGSMEARENAAATLFSLSVVDEYKVTIGGTGAIPALVVLLSEGSQRGKKDAAAALFNLCIYQGNKGRAIRAGLVPLIMGLVTNPTGALLDEAMAILSILSSHPEGKAAIGAAEPVPVLVEMIGSGSPRNRENAAAVMLHLSVQSVHLARAQECGIMVPLRDLALNGTERGRRKAVQLLERMSRFLVRQQEGISSHEQMLDELERQLDAFGPGVTEADILEQSGLL

SEQ ID NO: 3341 - protein, 412 aa, Zea mays
MAFEKIKVSNPIVEMDGDEMTRVFWQSIKDKLILPFLDLDIKYYDLGILHREATDDKVTVEAAEATLKYNVAIKCATITPDETRVKEFNLKHMWKSPNGTIRNIINGTVFREPIICKNVPRLVPGWTKPICIGRHAFGDQYRATDAVLKGPGKLKLVFEGKEEQIDLEVFNFTGAGGVALSMYNTDESIRAFAEASMTTAYEKKWPLYLSTKNTILKKYDGRFKDIFQEVYEADWKSKFEAAGIWYEHRLIDDMVAYALKSEGGYVWACKNYDGDVQSDFLAQGFGSLGLMTSVLVCPDGKTIEAEAAHGTVTRHFRVHQKGGETSTNSIASIFAWTRGLAHRAKLDDNARLLDFALKLEAACVETVESGKMTKDLAILVHGSSSVTRSHYLNTEEFIDAVATELRSRLGAN

SEQ ID NO: 3342 - protein, 536 aa, Zea mays
MASLSDSAGAGGGRAGAELMVPQFLLKALHAILAVRSPRPHAPPAPAASASAFRRRDRWFHLPIHAPPPPPAAEHLPDPSPGEPLVVDVYLAPSGGGPEEVLERWTVACEPWPSPAAAAAVGEGLAVNRAYKRCITLLRSLYAALRFLPAYRAFRRLCASGQVYNYCMGHRVGSFAAPFSRAEEAAMRTKRLAPVETQLGRLVVSVQYLPSLAAFNFEVTSLASAAIITDYVGSPAAEPMRAFPPSLTEATGSPFPQPSRRPNSWASPAPWPHTLGQPAKFSPPPAHYASPTPSPPTFGYLHSRFSGETAPMTIPQAGGGRGTVHHRNMSEPSRAFMFPPPSPKNVRGEAGMQESPTEINRSFKRADGIRMGDLYSNLPSGSKIKDTKDESGRFSGVFSSSGSPRHGFSRSSSRLSMQDDTDDADFPFAVDDVYPDSRPGSSSGKDTGDQAGSSSHKSQDAAVGYLVHLLKSARPLRDSTYSSHTSRGESTEAGSTSSFLSRRTSDALEEFESFKETRENLLARSRSRLQDSLDKP

SEQ ID NO: 3343 - protein, 598 aa, Zea mays
MADHSLTAPYDSCRLALGLGPTPNLYSADSHSFGGNKAYQSATLLSQHCATTDPGLMLGLSRCSSRNLQSTRASGSKNYSPARKTGIILPLIDEGSTSAKRKKGGYLLPLLFVPRSEDLCLNGTSTDTDAQQHIGTECDTESGHNRSLNLHEIQPSADLSITAGCSFAATSDVVADTSDEQRSHQRHPKKCRFNGCSKGARDASGLCISHGGGQRCQKPGCNKGAESRTAFCKAHGGGRRCQELGCTKSAEGKTEFCIAHGGGRRCGIEECPRAARGKSGFCIKHGGGKRCRIEGCTRSAEGHPGLCISHGGGRRCQYPNCDKGAQGSTIFCKSHGGGKRCMFDGCTRGAEGSTSFCKGHGGGKRCLFEGGGMCPKSVHGGTSFCVAHGGGKRCSVPGCTKSARGRSDCCVKHGGGKRCRFDGCDKSAQGSTDFCKAHGGGKRCAWSTGCDKFARGRSGLCAAHTTLMASKVVHHPGHARSMVGPCHFSGGVSGSSAADSNMDHAISSSGHGAWSDCVDSSRDMQSAGRLLIPRQVLVPGSLKDAPSCGLAGNGQDDGGSRNQSCGLVVPEGRVHGGGLMSMLGVGGNLGSNPDGSKA

SEQ ID NO: 3344 - protein, 1053 aa, Zea mays
MASHQRGGGRVGGGGWGQANPNVIQGQAGRGYGGGRGGQYYGDDSRGRGGQYYGDDSGGRGGGRGGGRGFDGRDGGGYQEGRGGGRGGGGYQEGRGGGRGGGRYQEGRGGGRGGGGYYYEGRGGDRGGGGYYGGHGGGYQEGRGGGRGGRGYQGQGGSDYGRERGHGGLQTPRPALRQAGPPLADRYAADAAALRDKFKTMDIHRDEPMFPARPGFGAVGTPCVVKANHFFVGLVEKGLHHYDVAISPETTLRGIYRQVMSKLVSENRQTELGGRLPAYDGQKSLFTAGELPFKTKEFVVTLSGRMERRYKVVIKHATAVSLDQLLMLMAGYPTDIPAQALQVLDIVLRDIVLNERNTMEYVAVGRSFFSPLIDSMGPKNLGLGVEGWKGFYQTIRPTQKGLSVIIDISSSAFIRPLPLIDFVMEILNKDNRTFRSITSMDLVKLKKALKGMRIEVTHRGDIRRKYRIASLTNSPPSSQFFESSAGVQKSVADYFREAYHLEMHYDFLPCLQVGSDQRPNYLPMEVCKIVAGQQYRKKLEGQQVSKLMDSTCQRPSLREDNICQIVEQNDYNKTERASEFGMEVDYRPTSVQARVLPAPTLKYRGTGSDSLCCPKDGQWNMIKKQVVDGARVGNWACVNFCQELRADGVGKFCSDLVKWSRTTGVDMDNLRLPIYTARPEQAETDLRRLYQDARNKLRGQKFDLLLAILPEKNGSLYGNFKRICETEIGIMSQCCLDKNVRSAGPAYFANVAIKINAKFGGRNLEFANPKESLPGVTIEPTIIFGADVTHPAALDDTAPSIASVVASQDWPKVANYNGIVRAQGHRKELINGLEDIVKELLLAFEERSKRRPKQLIFYRDGVSEGQFKQVLEQEIPEIEKAWKALYNEKPKITFLVVQKRHHTRLFPNNPNDRQWADKSGNILPGTVVDKDICHPTEFDFFLCSHAGIKGTSRPAHYHVLRDDNNFTADALQSLTYNLCFLYSSCTRSVSIAPPAYYAHKLAFRARFYVNQDSDAATSVGSYGSSAPSAAAAAAGPKPLPEIKGELRRLMFYC

SEQ ID NO: 3345 - protein, 553 aa, Zea mays
MALPAPPVRLALLLLVALPFCAAHPGPGAFNAPRHFQTPALHSDGFGLVARRSIAEAPADINVTTNSSFVLAADRTYRRDPLNGFRKYPGGWNISEVHYFASVGYTAIPLFAIALVWFVIFFLVMLGICCRHCCCPHHTYKYSRTAYALSLILLILFTCAAIAGCAMLYDGQGKFHKSTTTTLKFVVSQANYTVDNLRNLSDSLSAAKKVDIAQSFLLPPNVQNEINEIQGKLNSSATDLAIKTTDNAAKIKKVLNRVRLALVVIAAVMLLLAFVGFLLSIFGLEFLVSVLVIIGWILVTGTFILCGVFLLLHNVVSDTCVAMEEWVAHPTEHTALDEVIPCVEPATANESLYRSRQVTFELVNVVNQVITNVSNRNFPPQLTPLYYNQSGPLMPLLCNPFTPDLRDRNCSRGEVTLDNATQVWKKYECQSTTVSGGAEICATVGRVTPSIYGQMTAGVTVSQGLYQYGPFLIQLQDCTFVRDTFTTINQGYCPGLERYSKWVYVGLVMVSLAVMLSLIFWVIYARERRHRVYSKQHQPYPVEDKPAATVPGA

SEQ ID NO: 3346 - protein, 866 aa, Zea mays
MRLQGKLIKMRSFPHLLLILALLLVLENVRAQPKPLLINCGSGSSADVDGRTWVGDAHPDGGAGFTVTLAGATATRARKPVDEGGGGGDAAYGELYRTARVFNASSAYRFSVAAGSYFLRLHFSRLFSSNLSGDATAKEAVFDVTANGLRLLSRFSVAGEIYWRNSRTNSTSDVAVKEYLLNVTAARPLEVEFAPDAGSFAFVNAMEVVPVPGNSIFGSVNKVGGVGLKGPFSLGESGVETMYRVCVGGGKIERKEDDPRLWRRWDSDERYIFSMNAAHSIRNTSSISYVSRDGADSVPAPLRLYETARVTEETFVVDRKFNVSWRFGVDPGFEYLVRLHFCELEYGSAEQRRFKIYINGKTAAENYDVVAKAGGKNKAFHEDFLDDDDAAPASETDTLWVQLGSESSATSSAASDALLNGMEIFKVSRNGNLGHPTVRIGGVSGGLEDDRRKRSPRWVLVGAAAGVVIFVSVAAAVYLCFYLHRKKNTNTSAANKKTKTKTKDDNLPATTTAPGLRAAGTFGSCRMGRRFSIAEIKAATMDFDESLVIGVGGFGKVYRGETDTGTPVAVKRGHAESQQGAKEFETEIEMLSRLRHRHLVSLIGYCDEQDEMILVYEHMANGTLRSHLYGSESESDHLPALTWRQRLEICIGAARGLHYLHTGLDRGGVIHRDVKTTNILLDGSLRGEGGGLRHLEARPAAGPHPRQHRREGQLRVPGPGVLHEAAADAELRRVLVRRRPAGGPLRPARHQPGPAEGPGQPPPSGLWSGRGGACSRPWSTVGWTEATTWSPSGSWLRSPRSASRMRDGTGLPSVRSCGTSRPLCSCTKRICRAHQPQLLRVIWSPLMARLLATASGAPKRQQKPLV

SEQ ID NO: 3347 - protein, 323 aa, Zea mays
MKAMAGPKLLVVHASSNKALNGMAPTSPASPGWSRCLWLVVFLALFTCVSLLTVLSTARASAGAPACQAASLTASAAGATEAGLPRHVFDALVQYAAAAGNLSSSMPEPDVRAIASVLRRRAPCNLLVFGLGAETPLWRALNHGGRTVFLDENPYYVAHLEGKHPGLEAYDVAYATAVRELPDLLDAARAARAAECRPVQNLLFSECRLAINDLPNQLYDVAWDVILVDGPRGFMEGSPGRMSAIYSAAVMARTKGAETEVMVHDYEREVERACGREFLCDENRVTATSTPSLGHFLVRGGAAANREAFCGPPAGAAQKSKPS

SEQ ID NO: 3348 - protein, 314 aa, Zea mays
MAEFFEKNGGPTLEKAKNIKIYKKEELKPILRRSNFIGRGAFGEVYKGDLDGQSVAVKKPVDDSDGVHNDQFANEVIIQSRVNHKNIVRLIGCCLEVDKPMLVYEFLSKGSLDDVLHGSRRDPLNLKCRLDIAAESAEGLAYLHSKTTNVILHGDVKPANILLDEDWTPKISDFGISRLIVKDKQHTDFVIGDRSYMDPVYLRDGLLTDRSDVYSFGVVILELISRKKATYSGNNSLVREFLDAHKGKMEATKLFDEEIAKPEVSDLLNSLYEIAVRCLNLDVDERPSMTEVAESILMLKRSWSNTLTKTSSAS

SEQ ID NO: 3349 - protein, 301 aa, Zea mays
MLRPPALACCKLYISEARNSGALRAIEHAAAALRPLAVLVNTFADDAYNRVGYTLVSPLAGGGASPPLRCASFRVVAAAIEAVDLDAHAGAHPRLGVVDHVAFHPLASAHLEDVTALARAVAADIGDRLQAVPTYLYGAAHRDGRTLASIRRQLGYFTPTSPGGEQWHGAPDSLLPVAPDAGPRTSSASNGVVVVGATPWVDNYNVPLTTADVSVARRIARAVSERGGGLACVQAMGLAHGDGATEVACNLLHPDAVGADQVQERVSRLAAGLGVGVGQGYFTDLSREKVVELYLQAAQAA

SEQ ID NO: 3350 - protein, 472 aa, Zea mays
MVGGGTRTRRGRGRGRRSTRRTEEEAQQDDAVQQQVEQQAAVDAAQQDDDDAAQQDDDDDAAQQDISGSGSSGSRSIYLRGPASLPKRPILRDRRPLIRPDGERSWMVLETAGGHGRNPNGILGLLCREHFPGLVEYAGVTSPAYTFDHYAVAPDAVDRDGRQFNKAERVKQELWDFFRCDAGYEARADVVSTTCCKKLVVDMHYEARIQAIVTYHGSVLGEKVNKKDARTMSLTADQYLQMIPHWCAAHPECWEKMVQRWCSAEWDEAHNASRERRLLMQGPSHHQGSRSLGKYAEAWSAAHGGAPCSTFSAYAMAHKGKATSDVTYNPDDGPEAYTNPAIHSRLSEYTAMAKEVHGPDYDPRTEDIDGDVLMRVGGGKRHGRYWIADGAIDSSSTPTLSQVRARSTSASPAIRPRQDTSQHRIQQLQTQLDDERRQREELEKRMAEMFAYMQSPWRRTGSCSTTSVVPCS

SEQ ID NO: 3351 - protein, 99 aa, Zea mays
MIGATSFFPYPQIFHLAVVPFALGAESMGRCCRPAGQYTATLRGHGRGRLMVVGGVDQVLVVGSKMEHGDEPYLARKVVSSLRPGPLRAMPADKLASRL

SEQ ID NO: 3352 - protein, 1231 aa, Zea mays
MVAILADSIIFPDVPIALRLSSHLMLGVVRIYSRKVNYLFHDCSEALLKIKQAFRSTAVDLPPEESTAPYHSITLPETFDLDDFELPEAVFQGDTDHHVSTKEQITLQDNPEKTGYSTSQFGLDERFGDGSSSHIGLDLEEELILNKDHSIHLESDDGIIIQGRSSVPSTDMEIDDNKSTNITAEGYSNMDGGPSSHVKLGPLNADDLGGNSIRNWTGYNVQTPDLNDILLHNNEDIAGPSTSYYQPSPFTCDEPASPEFISAQAPATPGLMEETVPSRVHESPVLSPQRKASPSTNDETAKADTPAAPASDFLHSATGNASDVVGAEMTELGLAKPVQVESSVVQDSDASVQQHTSEGLPSQGQASHLEAAADKLVGSDGIAASVDETVTVNATIEDVPLAVNDSEPCVDGSAGPSVVNLVQMDGPLFDAQGTVLSADFQHEVQAMQQVVASNDRLNELSTSEFAEPEKMLTAPNAEFNHAIDLGQITAEKGTIESDGSNIIGSLTSRKRHLEYSLPALESETTKKLPSRPHVKRTNDFVPHDDDILASILVGRTPGFTLDSTPLPPRESSLKRPRLGSKMGTLKRKVQIDDAMVLHADTIRQQLINTEDIRRIRKKAPCTRSEIWMIEKGSLEDDLFHEPIFSCLSEELNNLHNRTYETIVHPAVQRMELHGQLDMPETIPEYRNIAGFGSATIDGPLHIPDGIQSDAMLSGANVAYGATAAFGLQIPPDYQVNRASNDFVVGTQLQEVAKPFIGNEHEVAPPDREHAQVDTLYSDRFQGVPSDLQRSNDANVSSQDVVLDNSGQACAHAVDGMTREFNHFVHRDANLFGSTEVPASEITGVEYNQDASGFPRQTEDDNTVEYNQDASGFPRPTEGGNAVEYNQDVSGFPRPTEDGKTVEYNQDASGFPRPTEDENTVEYNQDASGFPQPTEDENTVEYNQDASGFPRPTEDENAASATGDNSGFQENNTGSHMDLDMMNDYEVKECNDFGSAIHGVDTDFLNYGDDDNDDDFVDADEPNPSEFQSLDNSGWSSRTRGVARYLKTLFDEESGLGRKSVAIDHLVRGKTRKEASRMFFETLVRRLIFFAVLRRASLPGHRSATTSLLYVCFTPMHAGADDEGLHQRGPTEPLRLCEREARPEAAHVRVLVQQSQRTLARYIPSYHCIHHHTDQQQHRRYPPPPPLPKPFLCMLLQFPSPVASGALIRCCCQGVCPSRMVVVLYRRLSNSI

SEQ ID NO: 3353 - protein, 278 aa, Zea mays
MMERLPSFERLRTGLVRPADASDGGNASDRGRRRRHTHEEVDVRAMGLAQRQAFVERVLRVTDEDNERFLRKLRPRIDRANIQIPTVEVRFRGVNVQAECHVGTRALPTLANVSLDVAESLLGRVGVKLGKRKTLHILKDGSGVVRPSRMTLLLGPPSSGKTTLLLALVGKLDPTLEVSREVTYNGYGLDEFVPEEGGIHLPTRPRRRSAETETARRRGGGWWQWRAVGGGSASWATPPKAERGGACTAMGGGGVVAKGRDGCDGGGGGGGARSDRSG

SEQ ID NO: 3354 - protein, 113 aa, Zea mays
MAARPRLAGAAARAAMARLGARGGPAPAFPACDARPRPLRGLARPHSPGPGVASACARSPGAARARTEPPASSPHPRLTAVAARSRPHWRVPPLRSAAPARRGFGSRGRGAPA

SEQ ID NO: 3355 - protein, 567 aa, Zea mays
MATRPSLRSSDGARPRSKSGAGRPPSSSRSPGPSRPSSAAAADKPVPSFLRPTVSSSMHSSSSSSSLPLPCASSSSAAGSKGAAAATARRSADKAPARPVGAPRPITPKDRASAQPVGAPRPITPKDRASAQPVGAPRPITLKDKAPAQPVGVPRPAKAKAPASASLWGAVSPRQLMQRASNAFKASSRSRSKKGKEEAAASASSGGKGGAGASARAKGQTSRAQHQQQQPETPAEPSPAVTPLELEAEEPVLLESDAAGQNGQDVATSQEAASTDITTVAVRCQEEQVGAGQPKEKAEAEMSDLQEERPQSSEVVETETGAHERTDDGSPAVVGEAAATPEGEDELATSAAEEKIVEEIQRAEATENSKANANPEEPDQETGVISEEPKEGTSVVSEEPKPKEAADPTTAQKREEASDEPKTAAGSNASAPTTPLTEAANYDGNDDVEATPKQVSASEPVTPVAEGISKGKEVMETQQQSASAPTTPASKQAAIPEDAASALAFRGRRVRTAMERRSEEEQPKRKEVARSNDVIEEAKSKLMEKRKSKVKALVGAFETVMDSPRAS

SEQ ID NO: 3356 - protein, 247 aa, Zea mays
MPMLTLRRLVKKLRRAVIREFIRACHLGVLDDDRIGFAIQSAIMQMSADGFNGVWLPTLRRTARREPPRRGSMPRRARAPAVAVVPPSSTPVEATPTSNPYPPGYCPVHGYGQCVLRDAGILDTTIISALRQAAVAATSTARPTPTQAAEERPRWRPPTPAPPGFGRRPTMAARTGCPPFFSNAVVNSPPPSALPMPSPTLLPPRRHAGVAAARRPGLRPVKDEADLPNGSDSGWFSSDEEKADSIS

SEQ ID NO: 3357 - protein, 633 aa, Zea mays
MAAIVAARASAPGRAAVSTIAAFHSHASPSRALPLASSSIGGARRYHHAPACCFATKPTAPAAAELVDQDLATATQEAAKPRRKRRSRKAKKSATAAKEEDGTDDKPVAAAEDEAKRKKEAAGAEDSARALVAGLDDVIVNPVGLGRRSRQVFDEVWRKFSRLGQISSASSTALAEEEQAVLIRGGPMCEFTVPGAQDTTVLVVGATSRIGRIVVRKLMLRGYNVKALVRRNDPEVIDMLPRSVDVVVGDVGDPATVKAAVSGCSKIIYCATARSTITGDLNRVDNQGVRNASKAFQDYYNELAQLRAGKSSKSKLLIAKFKSAKSLKGWEVRQGSYFPNTFVSRFDEGIDASLDFSEDQQAVFSGFVFTRGGYVEISKRLSLPLGSTLDRYDGLLFSVGGNGRSYVVILETGPLADTTQSKKYFARMTTKVGFCRVRVPFSSFRPVNPQDPPLDPFLVHTLTIRFEPKRQRPGEASQNSSDPRNFELKLEYIKALPTGQETDFILVSCSGSGIESNRREQVLKAKKAGEDALRRSGLGYTIVRPGPLQEEPGGQRALIFDQGNRISQGISCADVADICVKALHDSTARNKSFDVCYEYVSDQGNELYELVAHLPDKANNYLAPALSVLEKNT

SEQ ID NO: 3358 - protein, 499 aa, Zea mays
MSPPPPPPLLRNELSRRTAVLGLRLWVLVGIAVGAAFVLLLVLISLHLAAARRRRPRKGVAHAPAHAPAGAPPLSPSTIPPVSKEIQEVAVHVGSLRHYLETGHAFLKDGGGGDGESVAYGSQRVHIEAGKGQRMVAAASDALSAAVGPEVSHLGWGHWYTLRELEEATAAFAPEHVVGEGGYGIVYRGVLADGYQVAVKNLLNNRGQAEREFRVEVEAIGRVRHKNLVRLLGYCAEGAQRILVYEYVDNGNLEQWLHGDVGAVSPLTWDVRMNIVLGMAKGITYLHEGLEPKVVHRDIKSSNILLDRRWNPKVSDFGLAKLLGADSNYVTTRVMGTFGYVAPEYASTGMLNERSDVYSFGILIMEIISGRSPVDYARPAGEVNLVEWLKNKVTNRDYEAIVDPKLPEKPSSKALKKALLVALRCVDPDSQKRPKMGHVIHMLEVDDFPYREDRRTLRPGNGSPLEKARNPAAGSCDGSSCYGGDTTTASTPSRLVQDM

SEQ ID NO: 3359 - protein, 271 aa, Zea mays
MAPPAFLSPPWQALLQAHSHGRRRASCAHVHLFCSSGAVASQFLPAGARPRLLPLLVRAQPGSASISTSPPWRCRRTSSPRPAMVSPWARAAVPSARIPLGRAPCSVGPIKFFPAAKLPRVHAQPRPLPRAALYLSAWSPAVSMAPSSDFCLVARCFPVPWSRLTASCQGSSCTRALVPLLAVGPTVGSSPASVVLGSKYFISVLQLQRPPLHRARQPRVVDLRSSCPAIGSASVDLLFAMASSSFNTTLHRCRCSIASLRCQSLRDASEL

SEQ ID NO: 3360 - protein, 91 aa, Zea mays
MAPPAFLSLPHGRRSFKLVPMAAIKLRARASISSAPLASWLPSSFQPARALVFSLCSLAPSWARPPSPPRLYGVAIELPHRVLPWSLPWRA

SEQ ID NO: 3361 - protein, 612 aa, Zea mays
MAGGGVEDVYGEDRATEEQLITPWAFSVASGYTLLRDPRHNKGLAFSEAERDAHYLRGLLPPALASQELQEKKLMQNLRRYEQPLHRYIAMMDLQERNERLFYKLLIDNVEELLPVVYTPTVGEACQKYGSIYRRPQGLYISLRDKGKILEVLKNWPERSIQVIVVTDGERILGLGDLGCQGMGIPVGKLSLYTALGGVRPSACLPITIDVGTNNEALLKDEFYIGLRQRRATGEEYHELLEEFMTAVKQNYGEKVLTQFEDFANHNAFDLLEKYRESHLVFNDDIQGTASVVLAGLLAALKVVGGTLADHTYLFLGAGEVGRFDLLVYCISVTLSFLCRSKLRITRGLILFSDYVVFVHLQAGTGIAELIALEMSKHTGSPIEECRPKIWLMDSKGLIVASRKDSLQAFKKPWAHEHEPVATLLEAVQSLKPTVLIGTSGKGGTFTKEVVEAMASQNEKPVIFALSNPTSHSECTAEQAYTWTKGRAVFASGSPFDSVELDGKVLVPGQSNNAYIFPGFGLGVVISGAIRVRDDMLLAASEALAEQVTEEHFAKGLIFPPFTNIRAISARIAAKVAAKAYELGLASRLPRPDDLVKYAESCMYTPIYRSYR

SEQ ID NO: 3362 - protein, 526 aa, Zea mays
METATVVVTPAPVSITHPPQHKFMKSSPARKPAKKKLASGRGGYVLEDVPHLTDYLPELKSYRNPLQDHPAYSVVKQYFVGPDDTVAKKIVVHRSSARGTHFRRAGPRKRVYFEPDEVRAAIVTCGGLCPGLNTVVRELVCGLHDMYGVTSIYGIEGGYKGFYARNTVELTPRSVNDIHKRGGTVLGTSRGGHDTAKIVNSIQDRGINQVYIIGGDGTQKGAASVHEEVQRRGLKCAVVGVPKTIDNDIAVIDRSFGFDSAVEEARRAIDAAHVEAESAENGIGVVKLMGRNSGFIAMHATLASRDVDCCLIPESPFYLDGKGGLLEFAEKRLRDNGHMVIVVAEGAGQDLVAESTRFADTHDASGNKALLDVGLWLSQKIKDHFKKKPSFPITLKYIDPAYMIRAVPSNASDNVYCTLLAHSALHGAMAGYTGFTVGPVNGRQAYIPFYRITEKQNKVVITDQMWALVLCSTNQPCFLTHEDDVERALMMDEEEPHMPLVEGENALFANPSMCNGNGHLCNGHKA

SEQ ID NO: 3363 - protein, 873 aa, Zea mays
MAATLGCSTPCPRRSTFRPFRPRCRRRGRAATRIILPCGWTRLPCKTTARASPPEKLTVALMYFKESTKQHLLVQVWVPIRKGDHYMLSTSGQPFVLDEQSIGLLDYRAVSMMYTFAVDGDSVEELGLPGRVYKQRLPEWTPDVQYYSSIEYARLNHAISYDVHGTVALPVFDSSMKSCIAVVELIMTSKKVNYAREVGEVSKALEAVNLKSTEVIEHPYVQIFNEGHQNVLVEMLEIITVICEELKLPIAQTWVPCKYQNLLIHCGGENKSCFDIHESCAQELCMSTSAVMFHIIDAHMWGFRDACVEHHLKKGQGVSGKAFILRRPCFTKDVTRFSKMEYPLVHYARMFGLAGCFSICLQSAYNRNEDYVLEFFLPPDCREDGEQKVLLDSILALLRQYLNRLQVATDEGSNEVYLQVDAITIIENGDIKNAHVQHMNCEGGIHASDERNMHVIHESDSQKRISPTESETCPSPDNTKCNDKLFARQNGGCISDSLLLENNSKHSGRRQGKEEKTFSLEVIQQYFTGSLKNAAKSLGVCPTTMKRICRQHGISRWPSRQISKVNRTVSKLKKVIESVEGHEGAFTLTSVTGPLPVAFGPSNPISIKNQSQINVSGLPIPSVQENRDSSSQSKLLENDIHRSTLVPQKSFLANINRQIEAEKASNSRNSSKDCRTHSGRSEESYPVSPANMTFVSTLLEPQQNMYIQDGFTKESFQKEDLRFHGMFVNGSGSLKDCMNHITSAVNGTIIGHPGSLTTAQNSGIITCPGSLISAQNSRIVTVKARYKEDLLRFRFPCSGSFITLKDEVAKRIQMDGVLFDIKYLDDDHEWVKLTCDTDLEECMEISRASGSNVLRLLVTDIAPVLGSSCGSTG

SEQ ID NO: 3364 - protein, 447 aa, Zea mays
MGKEKSHINIVVIGHVDSGKSTTTGHLIYKLGGIDKRVIERFEKEAAEMNKRSFKYAWVLDKLKAERERGITIDIALWKFETTKYYCTVIDAPGHRDFIKNMITGTSQADCAVLIIDSTTGGFEAGISKDGQTREHALLAFTLGVKQMICCCNKMDATTPKYSKARYDEIVKEVSSYLKKVGYNPDKIAFVPISGFEGDNMIERSTNLDWYKGPTLLEALDQITEPKRPSDKPLRLPLQDVYKIGGIGTVPVGRVETGVIKPGMVVTFGPTGLTTEVKSVEMHHEALQEALPGDNVGFNVKNVAVKDLKRGFVASNSKDDPAKEAASFTSQVIIMNHPGQIGNGYAPVLDCHTSHIAVKFAELITKIDRRSGKELEKEPKFLKNGDAGMVKMIPTKPMVVETFSAYPPLGRFAVRDMRQTVAVGVIKSVEKKDPTGAKVTKAAAKKK

SEQ ID NO: 3365 - protein, 185 aa, Zea mays
MGKEKSHINIVVIGHVDSGKSTTTGHLIYKLGGVDKRVIERFEKQAAEMNKRSFKYAWVLDKLKAERERGITIDIALWKFETTKYYCTIIDAPGHRDFIKNMITGTSQADCAVLIIDSTTGGFEAGISKDGQTREHALLAFTLGVKQMICCCNKMDATTPKYSKARYDEIVKEVSSYLKKSWIQP

SEQ ID NO: 3366 - protein, 121 aa, Zea mays
MPVLLCSPPPKNLKLPCTHAEADPKPVGWIQKLLSRTRRARQRQRHSEEARALTEGSAARVDGDAAPPGRRAEEHEHQRDDGGDQQPQEVEPGLLLRLVAAAQLTHLPNPQAAGTWLLGCT

SEQ ID NO: 3367 - protein, 111 aa, Zea mays
MANRKSTTDSDAIDELSDSNDLTADATTSRVPNSTPTSRSANTTVGRAGNTGKQRSARIKAKHRRTHERELDMGSGSRPRRAGWARRWRSCREKHRRANRKLRQNRGRRTP

SEQ ID NO: 3368 - protein, 269 aa, Zea mays
MAPTAPTQRPTMRHSSAFLLPSTAPSSPAPGPDDAAVAVVVLNQPLPRFAPLLWSRAAVRVCADGGANRVFDGMPALLPGQDPDEVRASYKPDVIKGDMDSVRPEVKEHYSNLGTRIVDESHDQDTTDLHKCIAFIAENYSATNKSNQLSILVLGALGGRFDHEMGNINVLHLFPSINIVLLSDDCLIFLLSKMHTHEIHVEKSIEGPHCGLIPIGMPSTSTTTTGLRWNLDNTSMSFGGLISTSNIVEEDKVTVTSDSDLMWTTSLRK

SEQ ID NO: 3369 - protein, 718 aa, Zea mays
MARGITTMEVRADGVAVITIINPPVNALSLDVIASLQRNYAEALSRNDIKAIVLTGSKGRFCGGFDIAAFENKPKNEKPGSMSIDFLTDIVEDAHKPSVAAIDGIALGGGLEVAMVCHARISTPSAQLGLPELQLGIIPGMGGTQRLPRLVGLPKALEMMLTSKTIKGKMAHELGLVDAVTSANKLVNTACSWALEIFEKKKPWFKSLHRTDRLPDLEEVKDILKFARVQAEMKAANVQHPIVCIDVIKEGIISGPRAGLMKEVLSGKMLEQSQTSKSLRHFFFAQRATSKIPNITNIGLTARKIKKAAIVGGGLMGSGIATILILNNFNVVLKEVNEQFLSAGINRIKVNLQSLVRKGQLTEEDYEKKLSLLCGALDYEQFRDTDVVIEAVIEDMVLKQQIFSDLEKYCHHNCIFATNTSTIDLNIIGQKTASQDRIVGAHFFSPAHVMSLLEIVCTHHTSSQVIVDLIDLAKKIQKTPIVVGNCTGFAVNRMFFPYAQAASFLVDYGLDVYHIDHVITQFGMPMGPFRLADLVGFGVAIATRKQYYQSYPERSYKSMLLQILVEDNRTGESSCKGFYVYDDKRKASRDPDFGKYIEKSRNMAGVMQDPKLMKLTDNDIVEMIFFPVVNEACRVLDEGIALKASDLDVASIMGMGFPSYRGGVMFWADSLGAKYVYDKLDAWSKDYGEFFRPCEYLAVRARQGASLAAKVDGVKSRL

SEQ ID NO: 3370 - protein, 884 aa, Zea mays
MDDFQGLLARDFGLRPQGKAAPMSAARSSSPSGSAWTNTRSAVGSAAPSAPSYDELFGSAPPPPPKATPSLDNIFNSFKEPASTAPPPKPKHSSAPVFDKPVYDDDIFIGVPGVKSSSVPYDDVFGGSQSREAPPAFDDLLGGFGKSSQVREEVDDKRKPEAPTAVAATGFDYLIPSFGGRSSPRQRDAIGAKQKKVSMSTSKQSASLSDPFVVLETTSSSAHPFADPLDESGKAAKYQGKNRESTSVGSSLFEDSSTFNQAPKFEPFFTPEVDNGSKDRNESSRAQNSNPVQDFSKRNSSQQPSVEDFENIFPKSQSARYSDVHVDIGSEKYSGNGINDQSPRSDESEDEIWLTASEIPLFTQPTSAPPPSRPPPPLAVKQKHGSRSTRKDEHLRRSRKNNDHQRSFSNQAGVSTVDGLEDFTMGKSQNVHTFNEEEFERSTAAAAMKEAMDKAEAKFKHAKEVRERERDAKLRNREQQERDNVIRSYAQDREDKERNERLEQEREMKQKEEKEREQRRLEEERELERHRERERARQAVERATKEARERAASEARAKAEREARKRSERAAVQRAQQEARERAAADAKDRAERATAEANERAATEAKEKAASQARDRAAAEKAAVERAQQEVRKRAERAAVERAAAEARERQAAAAAAAREKTSKPDDLESLFGMGARANSAPKQRAPTVDSMFDSQTQNRGTSTSTSMKKASSTANVADDLSALFGGAPTSSNEFQEVDGESEERRRARLERHQRTRERAAKALAEKNERDMQQQRDQAERHRLAETLDFEIKRWAAGKEGNLRALLSTLQYVLWPECGWQPVSLTDLITAAAVKKVYRKATLCIHPDKVQQKGANLQQKYIAEKVFDLLKEAWNKFNSEELF

SEQ ID NO: 3371 - protein, 277 aa, Zea mays
MGPGLYSDIGRKARDLLTGGFNTGQQLVLITHCSNGTRIAASSTKSNEFIISEIQAQLKNKNVTVDVKANSEANLSTTVTVEELGVLGLKKIITIPYPHPAFGRLEIQYLHDYAGINASSTMNRKPLVNLSAVFGNKAIAAGADVVYDGATGDFTKYNAGLSFTNADLNAAVTLNNKGDSLTASYYHLVDTEKNTAVGVEVARNFSTKANRVTFGMRHALDPTTTVKARYSSNGMASALIQHEWRPKSFCTLSTEVDVNRFDFLQTPKFGLSLVLKP

SEQ ID NO: 3372 - protein, 704 aa, Zea mays
MRTGRPKTFTGKPPLFSPPPPPPPPQLTVQFLSPPPSAAPYIPRQEQYRPGMAEGVAVAVAVAVARRFRIEPTRSRATLTDANVSSSALADDRAESRVEYPEPIYVSRDEEFEEGKNEMLSEGALKALLHNFMPLLVSSVSPDFRDFAGFHDVDNLFKEGLRLKQALQDQLFQKIPFVRKVQENSEGLLRYDTPDIIKRDKFAWLRDDEFARQALAGINPVNIERLQAFPPMSKLDPAVYGPPESAITEEHIIGRLDGMSVQQALEDNRLYMLDYHDIFLPFLDRINAQDGRKAYGTRTLFFLTGAGTLKPIAIELRLPPMTDGCARAKRVLTPPADATSNWLWQLAKAHVCSNDAGVHQLINHWLRTHACMEPFIIAAHRQMSAMHPIFKLLKPHMRYTLKINALARQILINGDGVIESGFTPGRYCMEMSSFAYRELWRLDQEGLPADLIRRGMAVEDPTKPHGLRLLIEDYPYATDGLLLWSAITRWCGAYVATYYPSDESVQADTELQSWYTEAVQTGHADKRGAPWWPRLTTPGDLASLLTTLLWLTSAQHAALNFGQYPLGGYIPNRPPLMRRLVPAEGDPEHAHLVADPHRFFLSALPGLTQATTFMTVIDTLSTHSADEQYLGERPDEAWTADPAALAAEREFADEVRRAEEEIGRRNTDAGRRNRCGAGVLPYELMAPTSGPGITCRGVPNSVTI

SEQ ID NO: 3373 - protein, 502 aa, Zea mays
MIKQILGRLPKKQAKSGEKELAGAGPSLPSPTADTRTTTDLTTSSRLVSPSNYASTATNQGQSFVAARAAGVSNGFPASAGYEALPSFRDVPAPEKPGLFLRKLAMCCVVFDFADPTKDAREKEVKRQTLLELVDYITSATGKFPEHVVPEVIRMVSANLFRVPPPAPRENKALELFDMEEEEPVMDPAWPHLQIVYELFLRFIQSPETDAKLAKRYIDHGFIVRLLDLFDSEDPREREYLKTILHRIYGKFMVHRPFIRKAINNIFYRFIFETEKHNGIAELLEIFGSIINGFALPLKEEHKLFLVRSLIPLHKPKCVAMYHQQLSYCVTQFVEKDCKLADIVIRGLLKYWPVTNSSKEVMFLGELEEVLEATQPAEFQRCMVPLFRQISRCLSSSHFQVAERALFLWNSNHIEGLIKHNSKVILPVVLPALERNTKGHWNQAVQSLSLNVRKIFMDYDPALFEECREKFEEEEAQEAGMRSRCEARWKRLEEIASSKEVK

SEQ ID NO: 3374 - protein, 305 aa, Zea mays
MMAIKSLSMVEASLPPGFRFHPRDDELVLDYLAKKLGGGGGPVVVSIYGCPTMVDVDLNKCEPWDLPDIACIGGKEWYFYSLRDRKYATGQRTNRATDSGYWKATGKDRPISRKGLLVGMRKTLVFYQGRAPKGKKTEWVMHEFRMEGRDDPMKLPFKEDWVLCRVFYKSRATVAKPPTESSSFNIDAATTSLPPLIDNNFNISFDQPGSSSVQNLEGYEQVPCFSSNPSQQPSSSMNAARLPPSAAMADPEQQMGKSIIKDVLMSQFSRFEGSVKREAPPSNFSQDGFEYLAESGFTQMWNSFN

SEQ ID NO: 3375 - protein, 337 aa, Zea mays
MDRWTGVVYVPLSRGGPLFRVAASLLLSPAKTLAVPRVNAILFTGDRVRGTGDPVIERLSDAAHLAGVLAGKLPGEANAWVVDAARFAGPFAVYRELVPTVDAAGDPKGYDPTGFPAAAGVANILARSIGEIQNQVPGLSAKDSAGNQHPPSYHPPARTIILGFSKGGVVVNQLVTELSRWGASGSTNQAAAADVPRPAAAGPGPPPHPTQNDLLLLGAPTRSSDDLLSSISELHYVDAGLNRAGAYVADRAVIGRIREHVVRAGDKSLRFALHGTPRQWCDPSRPWIREEKDAMVQVLADEARRSEGRLVLSEKLYFEGRPRSLLMHFEVLEAMDI

SEQ ID NO: 3376 - protein, 410 aa, Zea mays
MDDVPPGPAAFSRREGWGTSAAAAAATTNSRKTMPRSRGNEPPLRTSQRAPLHLKTTACSEANGAHHRPVADRSSPRVSPRSPLPEKKRAAGTRVAELEGKLGKVQEELKKLREQLASAEAAKKDAQVALEEAKKRVGTKGSPASTTTTTPLSPPSPGVEIAKKTEELKLPQPAAEEESSINVPATDVFEVVRAESGDKENQSAAEVCEVVSCGGGKAAVDVAENEETEEEETKKMIGEDNSAAVESDGADKESPEVVELKAKLAEKDTEIAALTAENAELKKQAEEAAEAAKKAEEGPASRAAKAEHELKEGAAREARVGEQLRASEAAREALDGELRRLRVQTEQWRKAAEAAAAVLGGDNHLTGLAGNGWGSPATMPDDGDDEGFGGKRKGAGIRVLGDLWKRKGSK

SEQ ID NO: 3377 - protein, 313 aa, Zea mays
MDSPSGLWWRPAPSSCPPFPSTPSMSPRYVGDPIVASFASSQLPPSTIEARPQRPPLPARHGARLATATAGPAPPTATPLVLHHPLAKAPSVSLKPPSPTDFCGSPRDADACGRARQDLSLTDAPPRSRRRGRRDTYCRGSPGDADACGGAWLDLSLTDERLRPTHRVPVVHLGLLLGATSPPSPRCCTCLYRGDMPKHVTEANLLVLFCEVATVEEVTIIKDKATKVSRGVDLPGPRSGLAALPSPRLLPLGSPQCCDLHCSLQRSFSPLGVGFGSNVTRRNLLCTGWSLWEIWAPWFGSELDHLQRLFQLI

SEQ ID NO: 3378 - protein, 410 aa, Zea mays
MERLGGPRPHHPLALLLLLGYYYAAAAQADASIQPHCCQSATTIYCRPLITATGPASKRQPGEGSRGLGQEAMSGDRSSTAERRRGIRRLLLHPRGEASSPPPPPPAPAPEEGRRKGFASAALRGLGCTSAAASKAYAPGAAAAAALRSSADWHGRRRRRGKDRRKERGGGGAGAGGGLVTGGIGADVWCAPGIPFAAEASSVDCVVARHQTVGRGGRGAEGERSHRERPCMSRRATVQEQISSPFMDSPPPHLDAPFFGADLIPSGRLRRMRGYRYSPGGLEEEIMMFQTRVLLGGMNMYDRYQDWRLDVDNMTYEELVELGDRIGYVNTGLREDEIARSLRKAKHPSFGSLRFAAEVERKCTICQEEFQSNEEMGRLVCGHSYHVLCIKQWLSQKNTCPVCKTAVSKN

SEQ ID NO: 3379 - protein, 320 aa, Zea mays
MPAPAPPIRLGPPTPYISSHGSKVARLHMYDWIVLILLAVLDGVLNIIEPFHRFVGSEMMTDLRYPMKGNTVPFWAVPIIGIIGPMVIITVIYFKKRNVYDLHHAILGLLFSVLITAVLTDAIKDGVGRPRPDFFWRCFPDGKPEYNNFTTGAICHGQASVIKEGHKSFPSGHTSWSFAGLGFLSWYLAGKIKVFDRRGHVAKVCIVLSPLLLAALVAVSRVDDYWHHWQDVCTGGLLGFTVASICYLQFFPLPSDENGLWPHAYFRHILEPEGDSQAQPTYMSRRSSVQNGSFQYSPDAVEMRSTSQAMDSMEAGQRAQ

SEQ ID NO: 3380 - protein, 100 aa, Zea mays
MRHAAAGASSAGIIWTAQRWWPPRPRLRRRASARRGPRGCGGRSRPRSAPAWAIPRRRTRSSRHATVRTQIYQLRAVRRGVWLTSGLGFSLSFLLCNKHL

SEQ ID NO: 3381 - protein, 734 aa, Zea mays
MASMLNIVIGSHVWVEDKDLSWVDGEVFRIDGQNAHVHTTKGKTVIANISNIHPKDTEAPPDGVDDMTRLSYLHEPGVLDNLAVRYAKNIIYTYTGNILIAINPFQRLPSLVDALTMEKYKGANLGDLDPHVFAIADAAYRQMINEGKSNSVLVSGESGAGKTETTKLLMRYLAFLGGRSGTGERTVEQQVLESNPVLEAFGNAKTVRNNNSSRFGKFVEIQFDKSGKISGAAIRTYLLERSRVCQINSPERNYHCFYFLCAAPSEDLKKYKLGDPSSFHYLNQSACIQVDGINDAEEYLATRNAMDTVGITDQEQEAIFRVVAAVLHLGNINFAKGREVDSSIIKDDKSRFHLKTAGELLMCDCEKLENALIKREINTPEGVITTTVGPNSATISRDGLAKQIYSRLFEWLVNRINASIGQDPDSNKLIGVLDIYGFESFKTNSFEQLCINFTNEKLQQHFNQNVFKMEQEEYTREQINWSYIEFVDNQDVLDLIEKKPGGIIALLDEACMFPKSTHETLSQKLYEKFKTHKRFTKPKLSRTAFTIQHYAGDVTYQSDQFLDKNKDYVVAEHQELLNGSKCSFVSGLFPPATEENTKSSKSSIATRFKMQLHELMETLSSTEPHYIRCIKPNSVLKPGIFENTNVLQQLRCSGVLEAIRISCAGYPTRKQFHDFLHRFCVLAPEILKEKNDEKVSCQKILDKMGLQGYQVKNTSLTNLLNMYWKRVFRFPNWW

SEQ ID NO: 3382 - protein, 255 aa, Zea mays
MTFTEKMVLAVFRDLTILWMTKSLMDDIHGWGVLFDGRVGDRTITVYIWNGEEPKPNKGHLAWADAFVITADSISMLSEACSTGLILKNVASLFMSKDSLKVEADTRLGELIKSVSGAAHGGCQVSSKGQKCRPCGRAAWARGEVQAAAVRACKEPGRQQPCEMFMLDMLVVLLIRRRESTNVEDMFLAHIFGMDTLARGLHNVVKLIEMIFSTKRYQSFDSEIGALIEDGKGDFEMLKKKVLECSALFHPASRN

SEQ ID NO: 3383 - protein, 174 aa, Zea mays
MASSSSLAIRSVLGCLILVALAVCGLPSLGSAMGVPQRQPNPINFTIGVEGVVWCKSCRYRGYVESRDASPLRNASALLRCRHGRRALSVWSATNAHGYFLVQTGAQAAPFTSRNCKVYVPRSPVRGCRVAVSPGRNKGSPLKFRRFVTRTDGLQARYSAGSFTFAPQDRSKCD

SEQ ID NO: 3384 - protein, 381 aa, Zea mays
MGRAAPSSSPSSPQLGRKRTAAPTPEPPTPQRHCSMVDVMRRSRAVAAPPPVARARVYTYYETLLCETCGLGDRDDEMLLCDRCDRGCHTFCLRPIAAKVPIGPWFCPVCAPPTMAPKSFPVKQTKIVDFFRIQKDEQDAQAAKCRLSQDGRRRRKRSLVMHKRRRRILPFVPSEDGARRLKQMASLATALTSSKTKFSNELTYMPNMAPRSSNLARLEVGGMQVLPKEDKENIELCRTMQQRGECPPLLVVFDPLEGFTVQADGDIKDMTFLAEYTGDVDYLENRENDDCDCIMTLLLPADPSQMLVICPDKRGNISRFVSGINNHTPDGKKKQNVKCVRYDMDGESHVLLVACRDIACGEKLYYDYNGYEHAYPTHHFF

SEQ ID NO: 3385 - protein, 150 aa, Zea mays
MAPNKSVGHPALRFLAAMALVLTVSVCGQSSSPAPTPAPAPAPATTPALAPIMPAPTPAPTPATTPPASAPTAPAPTPAPTPSLTPAPTPAPAPSENRCPPGFPNLITLIQAIKTTYPNKCNIIIVPVPFSPVNPGSGILPFPPYKCLCY

SEQ ID NO: 3386 - protein, 167 aa, Zea mays
MAAFATGSTTARATLASPTSCQPAARRAPARWMPLRCSPPALGLRGGARSRRSATLRVEAKKQTFSSFDELLEKSEKPLLVDFYATWCGPCQYMVPILQEVSEKLGDKIQVVKIDTEKYTSIASRYRIEALPTFIIFKDGKPCYRFEGALPVDQMIEQIENALAVTK

SEQ ID NO: 3387 - protein, 199 aa, Zea mays
MAAFATGSTTARATLASPTSCQPAARRAPARWMPLRCSPPALGLRGGARSRRSATLRVEAKKQTFSSFDELLEKSEKPLLVDFYATWCGPCQYMVPILQEVSEKLGDKIQVVKIDTEKYTSIASRYRIEALPTFIIFKDGKPCYRFVSVEKTMFSISINNLTCANILCFLSPLLPGIQEGALPVDQMIEQIENALAVTK

SEQ ID NO: 3388 - protein, 335 aa, Zea mays
MGLAGRHLSRNKVLFFSGALFISLAVGIHLSPYPPSLSLPHLASFLLLPHPGSASASSGSSCVQFLHRVSWSDAAGAADNGSGGGKARAWSWPPSLASACGFARLSRDDASLLLNGSWVMVAGDSQARLLVLALLRLLLDPAAAAAAEPELFRRHSDYRAAVPARDISVDFVWAPFESNLTRLLREDLRLAPRLPDVLVLGSGLWHMLHVTDAASYGDALASVAGAAKSLRSQLPEPPPHMFWLGLPHLVNHMLNTDAKRAHMNGTMVHAYDREVDRRGVLRGEGGSFLLLDVGKLTQGCGQQCTADGMHYDGDVYDAVMHIMLNALVIESQQRI

SEQ ID NO: 3389 - protein, 242 aa, Zea mays
MAATPTAAVLLARPLIALSSAFTSPHRARVPSDPSSISVPPLRSRWCQWRGPLRSLPPEGAPAELMEEDSKFVPLNADDPMYGPPALLLIGFEKGETVTIQAFLKELEGEFLKVIHCTEEMTKQTLWDAMHTEQPDLEAVKIAGPLPRICIFSGLTGEEMMMFINAFPETGLEAAAFAALVPNSAEKVLGEVIEEIMGDHEMLVSSVFFTKQHHSNHSVFSCSELSPPLRFADRKGLQMRRI

SEQ ID NO: 3390 - protein, 400 aa, Zea mays
MPRLRLPLVLLLPIALTIILLILFPFSPSPRSPPPQPLPCGAALSDAADGRWVPTPSPAPPPLYSPSCPFHRNAWNCLRNGRPQLAALSWAPARCGGAVVPRVDAAGFLAAARGRRIGLVGDSLSENLVVALLCALRSADDGARKWKRRGAWRGGYFPKEDVVVAYHRAVLLAKYTWLPVENSEVRKDGIKGTYRVDVDIPANDWINVTKFYDVLIFNTGHWWDRYKFPKDTPLVFYKGGKPIEPPLDMHNGLKVVLKSIASYIEREVPRKTLKLWRTQSPRHFYGGEWDHNGSCVSDRRLEEHELNSWFDPQFGGVNKEARTVNLAIQEALAGTEIQLLNLTYMSEFRADAHPAIWLGKKDAVAVYGQDCMHWCLPGVPDTWVDILAAQIMHHFKQEKG

SEQ ID NO: 3391 - protein, 73 aa, Zea mays
MRGAGAIVGYWSLPARCALPWSPPPRTGPRPPPPAVPPGLRSGLSCIWDCEMTRRAPRKNLWASSHFRAWQWH

SEQ ID NO: 3392 - protein, 476 aa, Zea mays
MAAELTQIVVVPFPAQGHVTPMLHLARAIVDRGHGSISATVAVPDFIHRRMGQYSAAGVALVSIPCGVADEDGSDEPPGPAMFLHAMEHRMPAQLEGMLQSARRGVGAGRRVSCLVVDLLASWAIPVAARFGLPVVGFWVGMVATYRTVAVIPELIAKGFVSESGTLLPADGTKNIGDLNILPAKLKLRFKDLPWLLDSALPQKSRISFWLQALDRAKSLRCILVNSISKEGGAGGDSPDDQQQYDYEYLPQDQQQIMLHVGPLLFNADASKKTATMWQPDKTCMDWLDKQSPGSVIYVSFGSWAAPIQPDRIRGFARGLEASGRPFLWVLKSHPSWRAGLPDGYAEKVSGRGKIVSWAPQEDVLKHEALGCYVTHCGWNSVLEAVRQGVRMICYPVSADHFVNCAYVVNVWKVGVELATSGQGDVKDCIERVMEGDDGRRLQRKVNALRETVTAGEAMRAAKRNLTLFMDRINGS

SEQ ID NO: 3393 - protein, 537 aa, Zea mays
MEPDFSTVGGPSFEFAFNEANFSDRELRIEVVAGDYDAPGSTGGGSGGGGLADWARHRKRRREELFKEKESTTYMSDQTNFNEVEAEECDAYEENQEEPVAMMEGSPPDVDQDGDDEQGIDPSWAAVVTPVLRVKTIYISSAILAAKSPFFFKLFSNGMKESDQRHATLRITDSEEIALMELLSFMYSGKLTTTEPTLLLDILMAADKFEVVSCMRYCSQLLTSLQMTTESALLYLDLPCSVSMAAAVQPLTDAAKDFLAVKYKDLIKFQDEVMNIPRAGIEAILSSNDLQVASEDTIYDFLLRWARAQYPKSEERREVLSSRLLPLVRFSHMTCRKLRKVLACTDIDHEQATKCVTEALLFKADAPHRQRALAADAITCRKFAERAYKYRPLKVVEFDRPYPQCIAYLDLKRDECSRLFPAGRIYSQAFHLAGQGFFLSAHCNMEQQSAFYCFGLFLGMQEKGSTSVTVDYEFAARTRPSGEFVSKYKGNYTFTGGKAVGYRNLFAIPWQKFLADDSLFFVDGMLHLRAELTIKQP

SEQ ID NO: 3394 - protein, 161 aa, Zea mays
MPGSGCAGSVHAWVGLRGMPGPRDEVARKGRAAMAGECEREGGGAAEPRKKKGAGEEEGEGLTAGGRTAGGDGRARAVAGELREVGERGDRAWGLGEGERGAVLGGAWRVGRTRQGGGGGLTARAGRGVRAGGGWAASGARGRPRLGRRAGPTAQGGEGVS

SEQ ID NO: 3395 - protein, 212 aa, Zea mays
MPPPPPPVRDAPTAPHRPRESASGHQKVRFRRKRLAVARRPTPRHLAHTPTSIAHRTVSISTSCSSSSVSPTTSHPVVVALTAAPAIEACGDVLLRYPLQPGGSAPHPAPAPAGRAGPVPHQHAALREHHHIRHAHLRRGQRLAALHVPPRPPRRAEKTPSTAASSPAAASTSNHALAYASVATRRSVTLAGTPGGSVRLFSPSVAPPMVGW

SEQ ID NO: 3396 - protein, 871 aa, Zea mays
MDRNEPNQPTRHPPKPRAAPTPPPAPTRQAERTTPAMSSSSSFKAGESSRAREELNRKYEVKFQPGPWAALSSIAVVLDDSAGNEERAKLLAPGASDFLLDLRPPLDGASYLVLPKRLVQDSKWFSFPCVISACSDRLLFLVSRGDQDRNYAYFLGDAHAGTAALLPDVPAHLGVETNFPRRSIGLIADPRHGGHYMVAHLYPTSTTRHQTLLCYSTVTDQWTARPLVSAPDHPPWGAHGVLAHGGLLWWIDVAYGMLVCNPFAADDGLRLRFIPLPLGCQMKALTGRARLFLEDMMDRRRIIRLSQGKLRYVAIQVQRIPKDQATVCMFTLVLRQGGQHSWEHEYTVTFADIWSHRSYADARLPSGVVPSLAFVDPNNPNILYFFLDKTLFALDAQARQVLHHMEYSLDPDYYGQLRVRYSCFVDAWVLPPTLLRKGDSRWTYDDDEGTDGSDFDQTTSLLSLMEIKSQLDDEGTDGSDFDQTTSLLSLMEIKSQLDDEGTDGSDFDQTTSLLSQMEIKSQSDREQTTAADVAAADSDVAAADSDEQANREQTKAADVPAADSGEQANREQMTAADVPTADSDEQDDQAADCDEQANREQTTAADSGEQDVPAADSGEQDIPAADSGDQDVPAADSGEQANREQTTAAVVPAADSGEQDVPAADSGEQDLPAADSGEQDIPAADSGEQDVPAPDSGEQAKREQTTAADVPDVDSGEHDVPAADSGEQANMEQTTAADVPAADSGEQDIPGFPAAVSGEQANREQTTAADIPAADSGEQDILAADSGEQANREQTTTVDVPPADSGEQDVLAAYSDEQDIRAADFGEQANREQTMAVDVPAADSGEQANREQTTAADVLAADSDEEADVEP

SEQ ID NO: 3397 - protein, 201 aa, Zea mays
MRVLITSVYTPDTSSCTTHQRLDFFSAASDGRRLPRRGGAGLVRQEELLEQPEHHEEAHPPPADDGVLARLQGAVEPGLPRGRPRRRPPGERAGLRGPCELLVEVLPQHVHLVLHREPRRAVAATQLLLVAARGLLLHGRDAPPVVVLVHCRRANNAAGNEQPRRRGGGEVGVALLEWEAGECELFHCKSLSLSLGLSCEL

SEQ ID NO: 3398 - protein, 228 aa, Zea mays
MGAPASAARPRPRLRPPRPRPRPVAPGRPHARPPARPSPARPPPARRARPPPAKSAPAPAAFGSAAFGRPGRPAPVGPGLARARPPRAAFRRARLGCPASAASPRPALRRARADPAPTPASATPPPSRAGTRRVSLRRARPSPRPGCPGSTAPARAPLGHPMPRLGRPAAPAPGSGRARLGPARPGRDRAPRPDRAPCSPARPAVPCSRRDGPDVASSSAQRAFSARL

SEQ ID NO: 3399 - protein, 457 aa, Zea mays
MAGLLHLQSTLLPSASALRRRAGVPVPSSSRRRCRIEAKIREIFMPALSSTMTEGKIVSWTAAEGDRLAKGDPVVVVESDKADMDVETFYDGFLAAVLVPAGDSAPVGSAIALLAESEEDIPVAQSQAASFSSTSPLPSPPQETAAQEASPSPPPPPPPGPVSVSAPTPPLPATQGERVVASPYAKKLAKDLGVDLFSVTGSGPCGRIVAKDVEAALAAPKKAAPVTAPRPDVPLGSTVPFTTMQGAVSKNMVESLAIPTFRVGYTITTDALDQLYKKIKSKGVTMTALLAKATAMALVQHPVVNSSCRDGKSFTYSSSINIAVAVAIDGGLITPVLQDADKLDIYSLSRKWKELVDKARAKQLQPHEYNSGTFTLSNLGMFGVDRFDAILPPGTGAIMAVGASEPTIVGTKDGRIGIKNQMQVNVTADHRVIYGADLAAFLQTLAKIIEDPKDLTF

SEQ ID NO: 3400 - protein, 461 aa, Zea mays
MLLPLLLAAFLHGLAEAQGGLPSLPIGVNYGANADNLPSPAAVAAFLTKSTTIDRVKLFDANPAFLDAFAANAPSIALAVSIPNSALPSFADRSTGLDAARGWVRDNLSPHVSAGANITLLMAGNEVLGPTVVPDLVVALLPAMRRLYQALQLEGLPKVRVTTPHYLGILAPSDGIPSNASFRPGLDAKVLAPMLRFHNDTGSPFMVNAYPYFSYNAATLDYAVFRPNAGVYDPATRLNYTSMFDAQMDAIHTAMKKLGYGGVQIAVGEAGWPTKAEAGQVGVGPEEARDFNAGMIRVCSGGKGTPLMPGRTFETYVFSLFDENQKPGPVAERNFGIFNTDLTPKYDLGLLRQGPQSGSPTPSPEPSPSVGGGKWCVAKSGASATDLQNNINYACAYVDCRPIQSGGACLDPNNIHSHASYVMNAYYQANGMHDYDCDFKGTGVVTSSDPSYGSCKYNASS

SEQ ID NO: 3401 - protein, 339 aa, Zea mays
MPAAPTLLPPCDAEEPLLAESSDRFSMFPIRFPQIWEFYKKAVASFWTAEEVDLSADARHWDEALSPDERHFISHVLAFFAASDGIVLENLASRFMTDVQVAEARAFYGFQIAIENIHSEMYSLLLETYIRDHVEKDRLFRAIDTVPAVRRKADWAMRWIDGGERFAERIVAFACVEGIFFSGSFCAIFWLKKRGLMPGLTFSNELISRDEGLHCDFACLLYELLRNKLDEARVREIVADAVDIEREFVCDALPVALVGMNGDLMSQYIEFVADRLLMALGCKKMYNVTNPFDWMELISLMGKTNFFEKRVGDYQKASVMNSLNGGGAADHVFSIDEDF

SEQ ID NO: 3402 - protein, 1101 aa, Zea mays
MSPLLLGFLGLLLVAGELVVVPTGAQNSDGGDDDKEVLVELKHFLQDNNKVNRGAYDAWQESDASPCEWHGVQCDTADRVTALDLSGSSISGPAFGNFSRLPALARLDLSDNTICAAGDIGQCLGLVHLNLSHNLINGSLDLSGLTRLQTLDVSGNRLSGGVAANFTAMCADLAVFNASTNGLTGNITGMFDGCARLQYVDLSSNNFTGELWPGVTRFTQFSAAENNLTGSVPPTTFPDGCKLESLDLSANYLTGSFPDSIAKCANLTYLSLWGNVFNGFIPAGIGKLPVLETLVLGKNSFDRRIPSALTNCTKLQFLDISSNMFGGDVQDTFGRLASLRYLVLHHNNYTGGIVTSGVLQLPLLARLDLSFNEFSGELPPEVADMKSLKYLMLAYNQFSSGIPPAYGRLTELQALDLSYNELSGRIPATIGNLTSLLWLMLAGNQLSGEIPSEIGKCASLLWLNLADNNLTGNIPPEMANIGRNPGPTFAKNRNGSSVLAGSGDCQAMRRWIPASYPPFSFVYSIMTRENCRSIWDRILKGYGIVPVCTNPSSPVRSYTISGYVQLSRNQLSGDIPPEIGAMVNLSLLHLDGNRLTGMLPAEISRLPLVVLNVSRNNISGAIPSEIGRILCLEMMDLSYNNFSGELPGTLSQLTDLTKFNVSYNPLLTGSVPTTAQFGTFDERSFLGDPLISFGTGTGKQPPPEAAGPRRSGMSPRSIAVWFLFSLLAAFVTGALVFFMANLRARFPVEQDPDPESFSFENPKCSSRKCSLQMSTPSGSSSSATGCSSSSSSSTEGVKVFQLGSTAFTYRDVVAATGNFSEHLVIGRGGSGVVYRGVLPDGRTVAVKKLARPRDDGDGDGDCEREFRAEMEVLADRMGSSWPHPNLVTLYGWCLSGSGKVLVYEHLDGGSLESLVGDTAAFGWGRRLEAAVGVARALVFLHHECRPAVVHRDVKASNVLLDRDGRARVTDFGLARVVRPGDTHVSTVVAGTVGYVAPEYGQTWRATTKGDVYSYGVLLMELATGRRAVDGAEDECLVEWARRMAREGWSSAGAVVGTVSWELLMLGMRCTADAPQERPDMPDVLAALLDVGEHGGTRLEFT

SEQ ID NO: 3403 - protein, 174 aa, Zea mays
MSSSYSTDRRSYAAGTGASAYATSRRHSPRTAWRISMMEKATLWARTLNVAFGTGICFAADARSFVGFFGVRTSFTRAFDLPRPVTRHRTRRSRPCIGLLEQQGGSSSILRRGGSRHCHRIFSPWMAWPLLYRVVDFIWKQQWKGIARKGALMAGASATHDCIDHLPSTERSGA

SEQ ID NO: 3404 - protein, 242 aa, Zea mays
MAGAPLHRAQLPLLGFKLLRTSPAPARHGAPALNAEHLPAEVLFLRAQSLSSPKRPRFLPWLLRALGCRPPVELPPTAPSFCALALPISVHASTLCFDQTSRLSVCDRHGYSVTLVVMETPLAPCSSAPLPNSWSRSRLAAAAAPTAAHDLLPCARSASLPSSSLRAEVARSSPSSLVFPARPVCAPCSLVVAFCFLVVRVVFRCSCACFGEGPCSILLYRVVVRAKLLAVDIVSVTRALDT

SEQ ID NO: 3405 - protein, 103 aa, Zea mays
MDLAYHGRRSRLPWQVHEHRRDRTCDGGRGRRRSGYVRVDERGRGAKCRRGLGERLHIHRLVPPLRDGEGQRSKSTGGVGLRSSIAFRSGSSRRRWWLRHGEG

SEQ ID NO: 3406 - protein, 406 aa, Zea mays
MKKLHWLVRFLFGPVPVYFSALAILIVLTNAQYFGLVGVGVAPRTAKLASSAPVVSVMKYCDIFRGEWVPDAEAPYYNHKTCHMIQEHQNCLKYGRPDLGFLKWRWRPSGCELPRFDPLQFLQFARGKSLAFVGDSLARNHMQSLLCLLSQVAYPKDLSANPSDQNKVYHYRAYNFTISMFWSPFLVRAREPDHDGPAHTGHWSLYLDEPDDKWVSQMPRFDYVLVSAANWFSRPSLFYERRRLVGCSFCSRQYGVPDLTLYYSQRRAWRVALRAINDLERLRGRVIVRMLSPMSHFENGTWDHGGDCRRTQPLRANQTAMEGRDLHFYTAQMEEFRAAEKAAAEKGRRLMLMDATAAMLMRPDGHPSRYGHWPNEKVQLYNDCIHWCLPGPIDIWNDMLFQMLLA

SEQ ID NO: 3407 - protein, 399 aa, Zea mays
MHSSASARGGRGLLLPAAAAAVVVLLLGAVAPAAGCYPRVFNFGDSLADTGNYPFVYGNDSAKLRPPYGETFFHRATGRASNGRLVVDFIADTLGLPFVRPYLSGRSAEDFAGGANFAVGGATALSPDFFRARGFHNMGNRVDLDMEMKWFRGLLDLLCPGNLAGCSDMMNQSLFLVGEIGGNDYNGPLLSGVPFEEIRAITPSVVAKISSTISELIQLGAKTLVVPGNLPIGCVPKYLMIFKSNKKEDYDPQTGCLRWMNEFSQYHNKLLVEQLKKLRRLHPGVTIIYADYYGAAMEIFLSPERYGIEYPLVACCGAEGPYGVSPTTSCGLGEYKLCDNPERYGSWDGLHPTESAYKVIAMGLLLGSYTRPPIASTTTSCPQLMELGSSAEYKRLYDL

SEQ ID NO: 3408 - protein, 473 aa, Zea mays
MAGEEAAEGSGTRRHMDLNLYLGLPPLPRPPVWLDPTLMPNLTGAAPESSITGEPEESLALGAAAYSPSNALSTPEEHPMLDPIVYSWLDGNRTDGEEDTDAPEPGPVDGANVSRSQLVVAATGLEGDDDLPLVRFVRPSQMVVAGGMETVNTSILQQSIQRAAAIEARTPELRFQRVIQISQQHRIVRPASVNRSQGAASTDADRLVWAIQRTHNSLEATRRQKLDDNNLCGNGSAKKDESCDCNSSFECNICLDPAKQPVVTPCGHLFCWPCLYQWLHAHSPHSECPVCKGEVLELNVTPIYGRGGEEGNSTNPDFPPRPRANRRESLRQQLQMTDTRGIATVVRQLIQNQGIISVLPSPTGIEMSVVPAGRQRARARRQQRQDNNASSSIHVVAQNMGNVAPESSNQIQLSHSNGDNAAQMVLAAPQQSSSVEQLSTSSTTAVILGEPGSSRRSRPSESPTIRRTRRRPQ

SEQ ID NO: 3409 - protein, 718 aa, Zea mays
MESEAGLLVRSSLNGEGLCMPAPRADPLNWGKAAEGLSGSHLDEVKRMVAEFRDPLVKIQGASLSVAQVAAVAVGAGGGEARVELDESARERVRASSDWVMGSMMNGTDSYGVTTGFGATSHRRTKEGGALQRELIRFLNAGAFGTGADGHVLPAEATRAAMLVRVNTLLQGYSGIRFEILEAIAKLLNANVTPCLPLRGTITASGDLVPLSYIAGLITGRQNSVAVDPDGRKVGAAEAFKIAGIEHGFFELQPKEGLAMVNGTAVGSGLASTVLFEANVLAVLAEVISAVFCEVMTGKPEFTDHLTHKLKHHPGQIEAAAVMEHILEGSSYMKLAKRLGELDPLMKPKQDRYALRTSPQWLGPQIEVIRFATKSIEREINSVNDNPLIDVSRGKALHGGNFQGTPIGVSMDNTRLALAAIGKLMFAQFSELVNDYYNNGLPSNLSGGRNPSLDYGFKGAEIAMASYCSELQFLGNPVTNHVQSAEQHNQDVNSLGLISSRKTAEAIDILKLMSSTFLIALCQAIDLRHLEENVKAAVKNCVTQVAKKSLSLNARGGLHNARFCEKDLQTAIDREAVFAYADDPCSPNYALMQKLRAVLVEHALANGDAERDVDTSIFAKVAEFEQQVRAALPKEVEAARAAVENGSPLVPNRIKECRSYPLYRFVREEVGTKYLTGEKTRSPGEELNKVLVAINQRKHIDPLLECLKEWNGEPLPLC

SEQ ID NO: 3410 - protein, 530 aa, Zea mays
MLMEPQNLGNTDDQFVWPWMGVLVNVPTEWKNGRQVGESGNRLKEQLSRFCPQKVIPLWSYRGHTGNAIVEFAKDWTGFKNALAFENHFEAEGYGKRDWKLKYSGSEMFGWVARADDHRCQGPIGDYLRKNGDLKTVGDLETEGTRKTDKLVANLASQIEVKNKHVQELESKCNETTASLDRMMEQREQILQKYNEEIRKMQQIARRHSQMIIDDNKKLHKELESKMQELDLRSKELDDIALQRDCDRRNLQQEKEKNKIKTKHLMMATMEQQKADENVLKLVEEHKREKQAALGKILRLQQQLDAKQKLELEVQTLESKMKVMMHMPGDQDSESKKKMDELAEELKEKVDELEAMESLNQTLIIKERKSNDELQHARKELIDGFMELAVVGRANIGIKRMGELDLKAFGIACKKRLPKEDAEVISATLCSKWQEEIRNPSWYPFKVKVVDGKEMEILKEDDEMLQELKEEHGEEIYGLVTKALLEINEYNPSGRYPVPELWNYKEGRKATLKEAVQHVMRQWKSHKRKR

SEQ ID NO: 3411 - protein, 602 aa, Zea mays
MTTLSSGVLLKLLDGMKSGAAKPVGEHRTAVLQVTDIVPAELDEKDLFPKHGKFYVKVSDASHSIYATLPLAQADLVLSNKLHLGQFVHVDRLDPASPVPVIVGARPLPGRHPLVVGTPDPAARAKPAAPRRGSWGPEQNAAIKPTTLNFDAERMTPVKERPALSTPVKDRAGGATPARERGAAATPGRERTAVASPALSSASLRKSSSVLPRLTRSKSFVADRDQQHPRIPKSPFPTVRSQPQLKSIGSQVESRLCLQINVDFQFVFAQEKSSVSCTASRATRRVAKEEEPSSPPSDDELGSSATSTKKRSATAARVPVPGKLSLLGKDAMEQREQAQKVALEALRNASATDNVARIYKLFSEVSKTARPEAPATCFDSFLSFHQEAVQAVTDIEAIQAATSMAAAVASDEQQLEDAPPVLQEIAQNRTVVRRRGIGLGSVSKSVSFAPGTLDPKQDDGGGKAIRSSSASRKCLATDKIGEDGGDEKRSSSSGPSSATTTTAHSALGSSLKLAKKIQAEAGSWFMDFLEAALETGLKKSKASSMGDGRKQSSCCCPQSLMLRVINWVEMEQSSGDSSGRKTAHPRAAAVARKLRIKAKNPS

SEQ ID NO: 3412 - protein, 473 aa, Zea mays
MYQDEQHTEEQHIEEEQHNEAEQHNEEVELNEEVEHVTWDQAAQHHQPWDQWDHQREQQQAWDQWGQQGEPADNPMDDGSGGSSATRTRRSRKSHSVKPRHAIEREADRTLIMPHGDRNWEDLSFDGKGHHTQVNLTLGSLCRLHYPGIVKVSNGDTEDEVLVSTWDEYKFKKERNHTDRQGLVRNDFWLRYRLPDGEDYMGHAERVLQNNAKKLVKDAIYYARIQATNLYFQKHPEEAGPLNKKEGSSKIYLTEDQYREVMVPWMAPVPDAYYAWCRYWASEGFQKASAHHRQCRGTNPNHKFGGDDMIRKAKRMEATSGQKPSDIEVYQEGHKGPDPNNPDQLCSQTATDRLVSFGSKVQTFKVYKFLHLYALFDGFIDSSSLMQQQGMTSNFPPPPQWSQFANTPVPPPQFTTPPTHIPAPGDRVTPEAGGSGSDPAVGTGFVDSLFAFPPPGGEGGSGHSSNHPSGGYL

SEQ ID NO: 3413 - protein, 205 aa, Zea mays
MASSWGSRLPLAVVLLLVACFSSTAAATSYTVGDGSGWTTGVDYTSWAASKNFKVGDNLVFNYAKGLHTVVEVSAAEYMACTAANPLGSDSSGATTVALRTPGTHYFVCSITGHCGAGMKLAVTVGGSNSPAATPRTSSPTPTTPYTTPATTTPYTTPTCSGGGGTTATPGMTPFTSYPSAAGLGSAALAGFSLVWCVGVRLALL

SEQ ID NO: 3414 - protein, 184 aa, Zea mays
MARLYIGNLDPRVTARELEDEFRTFGVLRSVWVARKPPGFAFIDFDDKRDAEDAIRDLDGKNGWRVELSRNASGGRGGRDRHGGSESKCYECGETGHFARECRLRIGSGGLGSGRRRSRSRSRSRSPRYRRSPSYGRRSYSPAARSPRRRSVSPARGRSYSRSPQHKGAREESPYDNGYRRSRS

SEQ ID NO: 3415 - protein, 325 aa, Zea mays
MAMEGPVFCRPAMQAKLPAAALINNSLTKSGQLGTALFGAISKYRNISRFISPISQTSTKNIGPCCSFSSSSDGNGYMAGNSSESDEDYVNSTVLEAVEVRSGSEGYVIKMRDGKNLRCVHSNFQGRNIPENTPQPAIVLRIEDGSGTLLPIIVLEMPSVLLMAAIRNVHIARPTIYQVVKEMIDKMGYEVKLVRVNKRIQEAYCAELYLTKVNDPTDNITFDLRPSDAINIAVRCKVPVQVHRSLAYSDGIRPVEPARMAVTAGLSDGLLFTELDRPDGQPCVEAQEFGLVRNMLIAAIEERYKDAASWKDKLIRLRSKRENWA

SEQ ID NO: 3416 - protein, 118 aa, Zea mays
MILETAGGHGRNPNGILGLLCREHFPRLVEYAGVTSPAYTFDHYAVAPDAVDRDGRQFNNKAERVKQELWVSLPRTILFNKSHLLHILEIMYGYIVFVCRISSDARLDTRHGRMRWLR

SEQ ID NO: 3417 - protein, 147 aa, Zea mays
MGTGRERAGRAEEMLASTARHRTWGAAQGEQGAWRAGQRTARRAGTARAQELRGKGERGAELGAATRGNRAEGRSPIESEQRAERRTHRKQRRQLAMGAWTARLGGELLPLCGRGRCRALKYPSRAAAGERDESVRDKAKGQATVGR

SEQ ID NO: 3418 - protein, 161 aa, Zea mays
MGTGRERAGRAEEMLASTARHRTWGAAQGEQGAWRAGQRTARRAGTARAQELRGKGERGAELGAATRGNRAEGRSPIESEQRAERRTHRKQRRQLAMGAWTARLGGELLPLCGRGRCRALKYPSRAAAGERDESVRDKAKGQATVGRSEIEKSHARDRIGW

SEQ ID NO: 3419 - protein, 140 aa, Zea mays
MAHEPGDPPAKQLDVKVQKASRGWPTKPTSSPTEQIPAEQPSEAGLPTKPPTEQPSQVGLSTKALIEQPSEAGLPTNLHVEQPNKTTVDSWANTSTERKSRPSTIEPHRHDGTSPNHPHTMEAILKGLYQTRCQICIPIN

SEQ ID NO: 3420 - protein, 97 aa, Zea mays
MAEHRGEPSLGGLAMEDDWRPWRTMAEDELGRPCGGEVLAAARSALAAGRRAEDRIWWAGSGAVTLGGVAEAQCCASGDRCSGGGRCCGSGAVGGRG

SEQ ID NO: 3421 - protein, 361 aa, Zea mays
MVSLVPRHRTNEQDTSGGAQQSLMPPRVGSSRSRGPGNVVVENFTLDMLHASTDGFSDDSQIGTGSFGSVCRGTLPDGREVAIKRAEDSAKASSSVARHCDQETAFDLELNALARANHKNIVCLLGCCADSGERVLVYEFMANSTLHDQLHSRSPLAAAMSSWRGRLTIALGTARGIEYILLDDAWTAKIADFGLSSVLDPSAGAGTPQVPLYTGGTVGYMDPEYYRLQHLTDKSDVYSFGVVLLELVSDRRVVQRYAKSVTPKNVVEFAVPHILADDVARVLDPRLPAPGVAEALAYVGYLAADCVGPVGCECPSMTEVVVALERALVACGAAPLSHAGTGCRSVLSRSGTDEFDLTDTD

SEQ ID NO: 3422 - protein, 347 aa, Zea mays
MELFPSQPDLSLQIGLPARATSHHHGAALSARLLAAAAGGSVGGGNGVPGNPAAAMAPSLQVPIPIPLQLPLPMPPNAAAMLRPIRGVPLYQHPHTHAVPPTFPPHAAGAGPCFCEPCHVAAGAWRRAGCGFGARVAGLFPPAKRAARAPRMRWTSTLHARFVHAVELLGGHERATPKSVLELMDVKDLTLAHVKSHLQMYRTVKNTERPAASSDQADGFESGSSSAGEICDDDNSSLDLHGTDGRRPESSSAVRHGRLTACNDHGSSTGAHGGALWNSSSREDWAGFPSDSNTGSMSMHSRSLKDQTMQSKSLEILSDMNSSCVSETTSCASELNLEFTLGPRIRH

SEQ ID NO: 3423 - protein, 687 aa, Zea mays
MAASPAAAATFLHHHLPFPSRPKTLLRPRLHRLAASINPSSTDETPAADPPVIPSISIKNTEPEEVARRRSWVEHGWAPWEEIMTPEVAFARHSLNEGEEVPLQSPESLEAFRMLTPSYRKKVEAEPGYLERLFATRDTPEPLETTWAGRLPLRLVPPRDWPPPGWEVDPDELEFIREAHRAASERLDMEAAAAAGVTNVEKLEDAPQDLALERYKMFLKQYKEWVEANRDRLEQESYQFDQDYFPGRRKRGKDYSEDMRELPFYYPGQVLLEHLYFTFFSLLASPFNSNHFLNGFMLLQICYGQVTTVHLYQGAFVNIGCVHEGWVPIKGNDWYWIRHHIKPGMKVYVEILAKRDPYRFRFPLEMRFVYPNIDHLIFNRFDFPPIFHRKEDTNLEQLWREAGRPPIPRKKPLKDMEKEPLVSDHPFVDTLWEWHNAEQMILDYEEQNPDKFKNTTYESTVDAPSIDEEKRVEYTEGYFKETLLKKKVVNISIKELDLDAARAERQLIKRLKKEAEERGEEYKVRKLRRNKEMDEYDLMQWRRSFEEREALIRDICCRKALDLPIEEPGRYDVDETEVYGKDYYDPEKPMYRYDYWGEPKNTEKTKLERDVERHNQQVVGDAKKWCEMSYDDYVRKKLRLEAAEARERRRKAAEAQEDEQEYDDGMDLDLKKMTDPRAPHNRFYITK

SEQ ID NO: 3424 - protein, 263 aa, Zea mays
MREMEHKRPVVRRQEPTVARTEDDVASGDEESDVEFEFPFVSQESGAGAGAAAADELFADGRIRASYPVFGRVLDEAAAPAPRAPLGRLFQLERARTSSVASRSSSSSSSSSTAADADAGVDGASPDSYCLWTPGSSPASSPSRPPRKSGSTGSVARWRRIGELVVGRSHSDGKERFLFLSAPPSPARDRDHSTDSKAKQPSRASKSAAAELDTVPAGRRMSYGGGGGAKASTGGRRTFLPYRQDLVGLFASAHGLSRSTLPF

SEQ ID NO: 3425 - protein, 789 aa, Zea mays
MLLISKIGEEYPDRMMLTFSVFPSPKVSDTVVEPYNATMSVHRLVENADECMVLDNEALYDICFRTLKLTTPSFCFWTVGDLNHLISATMSGVTCCLCFLGQLNSDLHKLVVNLISFPRLYFFMIGFAPLTLRGSQQYRALTVSELTQQMWDAKNMMCVADPRHGRCLTASAMFRGKMSTKEVDEQMINVQNKNSSYFVEWIPNNVKFHPFVPIIRDSSFDPSPPRSLPLPTPTRTRTGSRSGNHKTSVKAPEPPRAPPTTPRNPNAPPQRGISPITPYQFQFSKGRGGAAPPPPPPLTREETPPPRASPMLSDQELAQYVESLVQHTAAQGGTGISADAVVRQLGAQLGVDLSPKAQLIRSVLVALLGPAAAPAPDPTGSRKDPFDPATAAAAGGPRAETPPQQMHFSTAAASSAPAPSPAVPHFFPQQHQHQMQYFLSAPQQYQHQQQQQRAGASPSPFDIPASYRYGHQPLPQADQAQLQRLVQLQHQQQQLAAAARVAAAAAPTPGESPRAPEPPPAPAPAASKKNSSASVGAKRKGGPGGLNKVCGVSPELQAIVGEPAMARTEIVKQLWAYIRRNNLQDPNNKRKIICNDELRLVFETDSTDMFQMNKLLSKHIRPLESKNDSKPEAKKLKPQGDEPISSVETDVNQLPLMVSDALATFFGTGEREMVHSEAVKRVWDHIKSNDLEDPENPTVILCDSKLKQLFGRESLTAHGVSEVAFRPPLHAIYQYLTDATVWLVGCRRYDFLDSAGLTSWVVGADERTRDLLKLSVVFVSSILVKTDLQ

SEQ ID NO: 3426 - protein, 270 aa, Zea mays
MASSVRAPSGSVIAVASSSSSAALAGVCGTGSPCAACKFLRRKCQPDCVFAPYFPPDNPQKFVRVHRVFGASNVTKLMNEIHPLQREDAMNSLAYEADMRIRDPVYGCVGVISILQHNLRQLQQDLARAKYELSKYQAAAAAASASTAPTGPQAMAEFIGSAMPNGAAHNFINLGHSAALGSLGGSTAMFGQQEQFGSNAQMLSRSYDGGEPIARIGMNNGGYEFGYSSATTMGGSAGAVSGGLGTLGISSPPFLKSGTAGGDEKPSGGQ

SEQ ID NO: 3427 - protein, 320 aa, Zea mays
MEAVGKSVCVTGAGGFIASWLVKLLLCRGQYKVRGTVRDPGASKNAHLKVLEGAGERLQLVKADLLDYSSVASAIAGCEGVFHVASPVPSGRSSNPEVEVIGPAVTGTTNVLKACYEAKVGRVVVVSSCAAVYANPNYPKGKVFDEDCWSDEAYCRKNEDWYFVSKTLAEREAFAYAAKTGLDVVTICPSLVFGPLMQPTVNSSSKIILKYFTGDRETVENILRNMVDVRDVADALLLAYEKPEASGRYICSSHAIKVADMINILKTLYPSYPYPKNFVEDDDNSVYSSEKLQKLGWSFKPIEESLRDTVESYKAFGILN

SEQ ID NO: 3428 - protein, 1153 aa, Zea mays
MNDVLRTYLRRFVLVFFDDILIYNTSWADHLRHLCVVLNTLRQHRLFVKRSKCSFGVDSVAYLGHVISAAGVAMDPVKVQAIHDWPQPRSARAVRGFLGLAGYYRKFVHNYGAIAAPLTALLKKEGFMWSDEATAAFSALKRALTTAPVLTLPDFTKPFVVECDASTYGFGAVLIQEAHPIAFFSRSVAPRHRSLAAYERELIGLVLVVRHWRPYLWGRRFVVKTDHYSLKYLLDQRLATIPQHHWVGKLLGFDFSVEYKSGATNTVADALSRRDTDEDGTGTLQAISAPRFDFISRLRHAQATEPALAAIHNEVRAGTRTDPWAVADDMVLYDRCLYIPLASPLLQEIVAAVHNDGHEGVQRTLHRLRRDFHFPNMRSVVQDFVRACPTCQRYKSEHLHPTGLLMSLPIPTVVWADISLDFIEALPRVNGKSMILSVVDRFSKYCHFIALGHPYTAESVAQAFFADIVCLHGVPQSMVSDRDPVFTSTFWRELMRLMGTKLHMSSAFHPQSDGQMEAANRVIIMYLRCFTGDRPRQWLHWLPWAEYVYNTAYQSSLRETPFRVVYGRDPPSIRSYEPGETRVDAVARNMEEREAFLADVRYRLEQAQAVQKRHYDKQHRPVTYAVGDWALLRLRQRAPSSPPQQTSGKLKPCFLGPYRVIELINNVAVRLQLPTQAHIHDVFHVGTLKKFVGAPPSAPPPLPDIHHGAIVPEPARVERARLARGVQQVLVQWRGELETSATWEDLDKFRATYPDFQLEDELDLEGGRDVMWGRTYTRARDARRADARAFKGGANSSSPKEGSSKEESSSSSTKEGKSNLASGDYGESVKPSQTNGSTLKHQSDMPPPPAPPPRNNNFNGKEKQPVPVSREDDDDIFVGDGVDYLVPNKEMSQSPVSDMDESPHNHQKQSNFTEPLYGPVPPSESAQAWQQPNTYDAAVQAQMAAAGYQGDWSSYVYAEQQLGYPEQYVQQSTQEYDVLADPSISQDPRFMTQADKDRGLGSVFKRDDQRLNQLREKDARERDPNFISDSYSECYPGYQEYNNEIAGSDDEDDLSKMDMGGRAKGRLHRWDFETEEEWAKYNDQKEAMPKAAFQFGVKMQDGRKTRKQNKDQKLTNDLHKINKILARKKGEKDGAEDGGHYDDDLPSSKKQRG

SEQ ID NO: 3429 - protein, 260 aa, Zea mays
MASSVPAPSGSVITVASSSSSAAAAAVCGTGSPCAACKFLRRKCQPDCVFAPYFPPDNPQKFVHVHRVFGASNVTKLLNELHPFQREDAVNSLAYEADMRLRDPVYGCVGVISILQHNLRQLQQDLARAKYELSKYQAAAAASASTAPTGPQAMAEFIGNAMPNGAHNFINIGHSAALGSLGGSASVFGQEQFGNAQMLSRSYDGGEPIARLGINGGGYEFGYSTAMGGSGAVSGLGTLGISPFLKSGTAGGDEKPNGGQ

SEQ ID NO: 3430 - protein, 324 aa, Zea mays
MPAVVQNHRHPPSPQQETRGERRQLQPAAPAESLETERDLRIAMGDAKTSVLITMPSRDRDRDRLVPTAAVATHESPSALTVGDSDDDKSKPSSASAAAAAAQTGREAFHKVVHSWASKKFMTGCVILFPIAVTFYVTWWFFRFVDGFFSPIYAHLGIKIFGLGFVTSISFIFVVGLFMSSWLGASILGLGEWFIKRMPFVRHIYDASKQISAAISPDQNKHAFKEVVIIRHPRIGEYAFGFITSEVLLQGYSSEEQMYCVYVPTNHLYIGDIFLVSSSDVIRPNMSVREGIEIVVSVGTSMPQVLSILETEPNQLNRIRSTRS

SEQ ID NO: 3431 - protein, 306 aa, Zea mays
MAEKPPLSAKPPLPSKPRPKAASAARPTTTTPAPGSRPAASPFKKPTLAPPQVLPLKPPPAHQYRQQQQQQHPAPPGGARKPRAYRQQQPHPHRRGRGCSCRRACCLATGLALLALCLALAAACLAYLYYRPRAPSFHLQPLAPVRLRLGSNASTVDATVGARVVSWNPNERVEFRYGDGEGRVALADPDGDVALGWAPVRGFAHAPRRVAAVAFVATARGVVLDDAVAARVRDRYRRRRQGFRVVVDAHVGVRVGALRTGMVPLRLLCDDGVMAPRAVGSSDGAVVGPMTKCQVLLFRVRWFSLN

SEQ ID NO: 3432 - protein, 309 aa, Zea mays
MSSPTHVRKAIRFASLRAKIAQQGKTGLALRLLLAAALAGFLLVFAARTLVTPSPAPTSSSQAQEYHQDAAPECGKGNAGLPLAVAEALVHYTTSNVTPQQTADEIGVSLRVLQRRAPCNFLVFGLGLDSPMWAALNHGGRTVFLEEDASWIASVRSKHPGLESYHVAYDTVLTDADSLLGLRDHPACVAQPDLAAAAAASCRLALALKGLPPVFHELEWDLVMVDAPTGWTPQAPGRMAAIYTAGMAARARRPGDGPTDVFVHDVDRPVEDNFSKAFLCEGYLAEQVGRIRHFVIPSHREKDGTPFCP

SEQ ID NO: 3433 - protein, 893 aa, Zea mays
MGAAQLVILFLALATAVGAPPSEVAVGALFTYDSTIGRAAKLAIELAVDDVNSDGKVLPRTQLNLVPQDTNCSGFLGTIEALQLMEKNVVALIGPQSSGIGHVISHVVNELHVPLLSFAATDPTLSASEYPYFIRTTISDYFQMNAIASIVDYYQWKRVTAIFVDDDYGRGGVEALGDALALKRAKISYKAAIPPNSNTDVINDVLFKANMMESRVMIVHVNPDTGMRIFSVAKNLQMMASGYVWIVTDWLAAVLDSSANRGLKDMSHIQGLIVLRQHIPESEAKDKFISKWNNVAHNRNITSGLNSYGFYAYDSVWAVARAVDKFLSNGQQINFSTDPRLEDSNGSTLHLSSLKIFDGGEQMLHQLLLTNFTGVTGPVQFDSEHNLVRPAYDILNVVGSGSRLIGYWSNYSGLSVAAPETLYQMPRNTSTSAQQLHDVVWPGDSTTKPKGWVFPNTGLPLRVGVPIKASFKELVSGRGDNMSGYCIEIFNAAIKLLPYPVPCQFITIGDGTKNPSYIDIIRMVAANSLDAAVGDFAIVRNGTQLAEYTQPYIESGLVIVAPVKHVTSSAWAFLEPFTLEMWCVTVALFILVGIVVWLLEHRTNEEFRGSPRRQVITMLWFSFSTMFFSHRENTVSTLGRFVLIIWLFVVLIITSSYTASLTSILTVQQLSTGITGIDSLVSSSLPIGYQAGKFTKRYLTENFNVPLSRLVPLNSIQEYADALNRGPKNGGVAAIVDEKPYIDIFLSNYCSFRIVGEEFTKEGWGFAFQRDSPLAADLSTAILQLSESGQLQRIHDEWFSRSSCSSDDSEVGATRLGLGSFWGLFLVCALICLFALLVFFIRVCRQYNQYSSSEAAGEPQHSCCGSCPKTAATITPWQLQRPDPVRRQEGGGD

SEQ ID NO: 3434 - protein, 265 aa, Zea mays
MVSSLPLSSLLLLLLLLSAASFGGGVRLGDGGYEDWRLGTATYVKEFQSHPLNDGGGACGYGDLDIFRYGRYTAGLSAALFGRGGACGGCYELRCVNHIQWCLRGSPTVVVTATDFCPANMGLADDDAGGWCNFPREHLELSEAAFLRVAKAKAGIVPVQFRRVSCDRAGGMRFTITGSAHFLQVLITNVAADGEVAAVKVKGSRTGWIPMGRNWGQNWQCDADLRAQPLSFEVTGGRGRTVTAYSVAPADWMFAQTFEGKQFAE

SEQ ID NO: 3435 - protein, 493 aa, Zea mays
MAPECSRRDAPPSATLLIVCVALYTVVLAVASSPKALASSSALSSRARAAPEQQLLLSADLTTEESARRPGETRRPPSVEQELDVARAAIRRTAQRHGDAGRAGDGNVSSANTWFDAGVEYALLASVYRNPAAFHRSYAEMEKLFRVYVYEEGEPPILHAGPCKNIYTIEGRFIEQLELMAPSPASSSRRGTRRRSASDVRTSEPARAHAFFLPFSVSQMVQFAYRPNTYDKTPLRAIVADYVRVVASRHPYWNRSAGADHFMLACHDWGPEASTGHPELHANGIRALCNANSSEGFRPWQDVSVPDINLYDGDMPRQLLAPAPGVTSRPFLAFFAGGRHGHIRDLLLRHWKGRDPDFFPVYEHRHEDGFDYYSFMRRARFCLCPSGYQVASPRVVESIHAECVPVILSDGYVLPFADVLRWEAFSVAVPVADIPRLREVLERIPAPEVEKLQQGVRLVKRHFMLNQPPQRLDMFNMILHSVWLRRLNLRLDH

SEQ ID NO: 3436 - protein, 302 aa, Zea mays
MQRSGRQQLPRRAPAAMDLFPDGAFVRLQNRVQQKYLYADDDGEGVSVRPYGHVFSLNAVWRVHRVLVAGNNIVLLQGVAYGRYLAISPGMAPPGYRGRRAVQRDYAGDNVGALMWNPLRIVDGERYVRLRNEFNRNLLRANGRYRTWHTAVTADIDDYGRLSTMMQWTVHRFQVVPGLPPLPRPTVYLGGRRGLFGRRMPEADERRTIRHVRANNEGDFDQDSNNWPTFNFFGRSVFNLRIQVGMRQPGGEVWAITMAVRPGSQGRLTPLVTDLPNSVDNMDIVVFDTGSQGAQNLVYPAI

SEQ ID NO: 3437 - protein, 495 aa, Zea mays
MWNEAMASDGSSSSTFRGLYGNVHGPAVLTGAAFALVALLISLWLILQHLRSYSDPAEQKWIIAVLFMVPVYACESIISLWNSKLSLACDILRNCYEAFALYAFGRYLVACLGGERQVFRLLESRKRDELSQELLDKARARNRGGAYSFFCDPDALGENLYTIIKFGLVQYMILKTLCALLALVLEPFGAYGDGEFKWNYGYPYIAAVINFSQTWALYCLVKFYNATHEKLQAIRPLAKFISFKAIVFATWWQGVGIAIICQTGLLPKEGKVQNALQDFLICIEMAIAAVAHAYVFTVEPYQHVPALPPDHGEVMCQESKMEVEVDVDDDTGGTPASIAQQETHVEAPGGTSIKESVQDVVLGGGQHVVKDVALTISQAIGPVEKGVGKIQEKFHHISLKPGDKKEPQVAVEEHVTENVVDGKPAVAVNAEVEVQQKAQDRRGEEEGVQLKRTEKEGRLSHLRVPWWKMQRKREQVQEQAESKAEAVRGPDGEQG

SEQ ID NO: 3438 - protein, 293 aa, Zea mays
MMPQASASLDLGLSLGLTLTSQGSLSSSTTTAGSSPWAAALSSVVADVARARGDAYAQHHAGAAMTMRASTSPDSGDTTTAKREREGELERTGSGGVRSDEEDGADGGAGGRKKLRLSKDQAAVLEECFKTHSTLNPKQKVQLANRLGLRPRQVEVWFQNRRARTKLKQTEVDCEYLKRWCDRLADENKRLEKELADLRALKAAPPSSAAAQPASAAATLTMCPSCRRVAAAASHHHQPPPPQCHPKPTVAAGGGSVVPRPSHCQFFPAAAVDRTSQGTWNTAAPPLVTRELF

SEQ ID NO: 3439 - protein, 478 aa, Zea mays
MRTKHLIPNNAAGLTYAARDYSAGEDHGGGDGVGGDPFEGFPDAVLGLIVSKLPLRSAVAASAISRRWRGAVAAAPALDLDFAAAFPAAPRRRAAFAAAVTAALGSSAPPHRHPLRRLRLALEGFFDQAFAASAADHLASWLTAAAARGVERLELHLPRSRLAVLPPSLLACTSLTSLTLRLDRYALPLPSFTTFTRLSRLHIACVSLNAEDDFFGDLFLHCKEVRYLILEKCRVGALRLTGPSRLCSLAITDCSWTEESALAVFEMPELRILHYSGAIAARHIIDGEVSLEDVLLNIEKPLVKPREAALRELLTLVGNARRLALSPWCIEQFARPEEWSKLQLDKVRWLTCIVERREEGALSIVPLLSNCRNVEELCVSVVPSQGKWRRNSGDGGSHGVLGGKRVSVKHLKVVRMKYIDESRSGFKLVKVLLKNASALETMTIVPSMDGLEQAKFRRRVLKLRKSSQNASVQFCTAG

SEQ ID NO: 3440 - protein, 798 aa, Zea mays
MHPFCCAPLVPVSPVASAAAASSAVAGAPAVMPPPQPPPPPPPPPRSNPASGGERRARAAGVSGGGGGGSSPPEGVKLNEIVGGGISGILYKWVNYGRGWRPRWFALHDGVLSYYKIHGPDRIILSRETERGAKVIGDDSLRRLNRPSTSSSSHSNGHHHPRNPIGEIHLKVSTVRESRSDDRRFSIFSGTKTLHLRAETREDRAAWLEALRATKDMFPRMSSSEMVGPGDTAAAVAVSTERLRQRLQQEGVSEAAIADSEMIVRAEFEALHKQLVLSKQKHALLLETLRQLETEKVDLENTLVDESQRQSKEYGSASKPRHEKYSEGSASESDDYNEPQDPAEETDDDENLYFDTRDFLSSSSFKSSGSDFQRSEAGSDDEDDYPMDGIDPSMKSIGISYPYVRRRKKLPDPVEKEKGVSLWSMIKDNIGKDLTKVCLPVYFNEPLSSLQKCFEDLEYSYLIDRASEWGKRGNSLMRILSVAAFAVSGYASTDGRSCKPFNPLLGETYEADYPDKGLRFFSEKVSHHPMVVACHCEGTGWRFWADSNLKSKFWGRSIQLDPVGELTLEFDDGEVFQWSKVTTSIYNLILGKLYCDHYGTMRIQGNREYSCKLKFKEQSIIDRNPHQVQGVVQDRNGRTVATLFGKWDESMHYVMGDCFGKGKGTEQLSEAHLLWKRSKPPKFPTRYNLTQFAITLNELTPGLKEKLPPTDSRLRPDQRCLENGEYERANAEKLRLEQRQRQARKMQESGWKPRWFAKDKATDTYRYVGGYWESREKSSWEGCPDIFGQVPNDLMVTD

SEQ ID NO: 3441 - protein, 858 aa, Zea mays
MYMCCFILAGTSVMKNVDRPPSNPKQIIIQSTQECFSVDIPRAPAGTVRPETRHAADEDDDFMPLSKKRKLDDSPGKVLKKQKLNVRYNPQDVLVSIQILNDRQQQAIARRGFSSILDMRLDALGSRSHLAWLMEKLDHNDMTIRAGPGKELKITKDTVHLILGLPNAGGGTALGIDEAVVANNLRVELGLSKEDFGVTALQDRLRKGSDDDLSIRCFFLILFNRLLFPTASWGITNHEVLLTEQMDRFHQIDWCQLIFNDLCQAAKKWHNRSVTNVSTTIYGCSIVILLYYLDHLHDSAAPQNKRGTPRIKYFDRNIIQALTRADKGKIRKGEEAFGHCSHKTRTKTFDVPRPDPSGQHSIYIELPLIRDLISSKLNQLPSRHRMGFIEKLSHFDAEVGKACTVIKQTLQQIVEKQFNLSDVFGELIDEVLRAEAGDNKDAYDVQKTTSKSDDILPQTAEGCTCLAPPTVPDMSTPVSQLDTQFTDTQGKHGDGGKNMPTNTNVTPKATPHMDPDAPIFDATPQIKSTGGVQQVAETDLPDSGPCFDQTPSEHVYVETDPATNTPQVGQTSLDSEMQTVLALREYLCGLQSDTGRTIIDYGEYSATCSDIYESFADGKCLDNGFMQCFIQCVIHDAKNQQTSMGSNSLVLDVNVGSILNFEEQERHSRNPQPFDESVLHTLLDNSLPETDELDQCKAIMVPMVSRGHWTLYVVNKVKKCIHILDSNPYGPTLGGTTWKDYHFAHLGSGGRKLPWAKVIMSRLNKAIQHVRPSSCFPKFGNFTIDLCQNCPNMAAGSNDCGFYVMGYILFYQCDEGSLRSDIEAGNTSEIRSLALHYITFHPKNKALSLLQDIQRFKV

SEQ ID NO: 3442 - protein, 365 aa, Zea mays
MIFPPAFLQDSSSWNDNQHQQQQHHHQQQGHGHLQIAVSGSGDANHELLQQPIMGGALPDGGGGGGGGGQVGGPAKPMSMAERARLARIPLPEPGLKCPRCDSTNTKFCYFNNYSLTQPRHFCRACRRYWTRGGALRNVPVGGGYRRHAKRAKPKQQQQQHAAAGTGAATGAMQQPPAGSMASSAAACTATTTMTTNALHAGPGGGMLPMLPPLLRLADFDAMSLGSSFSGISSMGKPGSIGAACYPHSVGGLEQWRVQQMQSFPFLHAMDQGPLGPPLAMAMAAPGGMFQLGLDTTSDNSRGGGGGGEDGSSAGEALHMMQATKRESYPAAPRAMYGDQQHNHLAAAGGYTSYSTNAAAGNHLL

SEQ ID NO: 3443 - protein, 208 aa, Zea mays
MKRFAVQESEMARMLVLMSRSHGQDQALPLSACLAGGQRGEDRQAPERVFVCKTCNRVFPSFQALGGHRASHKKPRLDGDGAGDPSLAKPKLHGCSVCGLEFAIGQALGGHMRRHRAMTGGVPAVPPATTRIVVDEKPDGDVVGIIRHDHGGVKQPGGGLWLDLNYPPCDDGRDAVEAECGRNAAAATGITFHQFLDTATMAVDCLGY

SEQ ID NO: 3444 - protein, 578 aa, Zea mays
MRGGAMKALRRSSTSSAPSPRVPSSPRSYSWIHRRSLLVTSPASPATSSVSESANLPAEGSDSAPASVVAASSSPSLAASSPNMECTFHSRGGIKSPWSRRKRKRALTCQHWNRLFSANGKLRDGGRKFLKKVRSGGIEPGIRAEVWPFLLGVYDLNSSEEDRNTIKIKKRKEYEKLRRQCHRILHCNRENGLNVINEFMNEDFSDGAEGSESPYSNGVSKRVCVMPKELKSLGSKAEESESSNWDAVKCIDEDITSVDPCLVESESSESESSYEEDPDRTPVSTNMEENCGPKPKFARTASSKSEIIISDRTPEDFATWQRIIRVDAIRANTEWVLFARNQAEVSKEKALQSAISVGLKDFDHLEPYMIYHAARLVALLEAYALYDPEIGYCQGMSDLLSPIIAVMEEDHEAFWCFVGFMRKARHNFRLDEVGIKRQLKTVSQIIKRKDSHLYRHLQKLQAEDCFFLYRMVVVLFRRELTFEQTMCLWEVMWADQAAIRAGIGRSTWARIRLHAPPTDDLLLYAIAACVLQKRKLIIEKYSSMDEILRECNSMAGQLDVWKLLDDAHHLVVDLHDKI

SEQ ID NO: 3445 - protein, 640 aa, Zea mays
MTLDSYSLNIAFYATARLPSVSVGAQLHSLSVKLGLVSDTFVLNSLINMYSSCSYPTTARQVLDSAPQGACDTVSWNTIISGYLRCGMPNKALQAFGQMVKEPVRLDDVTLLNALVASAKAGKAKVGRLCHSLVVVNGAGINCYMGSSLISMYAKCGLVEDARKVFHGMHERNVVCWTSMISGYTQLGKFKKAVDLFRDMQITGMKADDGTIATVVSSCAQMGALDLGRYVHAYCDVHGLGKELSVKNSLIDMYSKCGDITKAHEIFCGLTKRDVFSWTAMIMGFTVNGLCNEALDLFAQMEGEGKVMPNEVTFLGVLTSCSHGGLVEQGFHHFQRMSMVYNLAPRIEHYGCMVDLLGRAKLLTEAEQFINGMPIAPDVVVWRSLLFACRACGEVGLAEFVAERILELEPKKCAGHVLLSNVYAATSRWVDVNKLRTSMDSCRMSQIAQVVVEFLEVAISCIVFLKGFYPPRAFERRRYMNVVVQKALHPELTSYIHSVTFGLLPFIQKGLVERVVVIFYDKGHVPTEKFVFKLAVNQSYRSKLEEANLEFALRAFLIKLTVAEPVTRPLPPDGSWEVTAYFRSLPGDGDREAQLWIPTDAELWMQPPQITPIKSVSCDPLTMQLYLEHPSVTEPKEPPA

SEQ ID NO: 3446 - protein, 475 aa, Zea mays
MATHTPQPQDLASNGGDPHVLLVPYPAQGHMLPLLDLATLLAERGLAVTVAVTSGNAALLAPLLRACPSAAVLALPFPPSSPLLPPGSGENTKDLPRHLFRPFMASLAALGPPLLAWCHAQSRHGRRVTAVVSDFFTGWTQPLARDLRVPHVTFSPSSALHLAMSHALWRSPPTRHLDDEAVTFPEVPGSPTFPWRHLSGLFRQYAAGDEVSEAIRQLFLWNLGSDCFVANTFAALEADCVTRPLPDLASKRVFAVGPLSDASASADRGGEPAVAAARVSAWLDAFPDGSVVYVSFGTQAALSAAQAASVADALARSSAAFVWAARAGTAVPEGFEARTAPRGLVIRGWAPQVEVLRHRAVGWFLTHCGWNSVLEAAAAGVAMLAWPMGADQFTDARLLAEAGVAVPVAEGADAVPDAGAMAAAIAKAVGNEWGAVRERADELGRMAAAAVAEGGSSHRDLEEFVQMLLTASFHC

SEQ ID NO: 3447 - protein, 460 aa, Zea mays
MSWRRGGSGGDGGVSRRWAVLLCVGSFCLGLLFTNRMWTLPEASEIARPNANVEEGTVPIAAECGSKKVQEKQDYRDILQVQDSHHDVQTLDKTIASLETELSAARSLQESLLNGSPVAEEYKVSESIGRRKYLMVIGINTAFSSRKRRDSIRYTWMPQGEKRKKLEEEKGIIIRFVIGHSAISGGIVDRAIEAEDRKHGDFMRIDHVEGYLALSGKTKTYFATAVSLWDADFYVKVDDDVHVNIATLGQILSKHALKPRVYIGCMKSGPVLSEKGVRYYEPEHWKFGESGNKYFRHATGQLYAVSKDLATYISINKHILHKYINEDVSLGSWFIGLDVEHIDDRRLCCGTPPGEFFHHFMPLTDKLKLVCSSFTRPRHLNCSSETWLWEPAAEQCQLFFMEPHLMTPLTTDCEWKAQAGNVCAASFDWRCSGICNSEGRIWEVHNKCAEGEKALWNATF

SEQ ID NO: 3448 - protein, 916 aa, Zea mays
MDLDPAYPPSACADAWPFDSLTTSLLFSPQLTPIPANSSFSWLTPHSPLWLFEDRHLLPLDAPAVFEEVQRPRSGNSHTSSKPAEQISHRWQFHLSLDEDGTDNSSLFKEKLTHALRYFKESTDQHLLVQVWAPVKNGDRYVLTTSGQPFVLDHQSIGLLQYRAVSMTYMFSVDAENVGDLGLPGRVYKQKVPEWTPNVQYYSSGEYQRLNHAISYNVHGTVALPVFDPSAHSCIAVVELIMTSKKINYACEVDKVCKALEAVNLKSTEIHDHPNVQICNEGRQAALVEILEILTVVCEEHKLPLAQTWVPCKYRSVLAHGGGLKKSCLSFDGSCMGEVCMSTSDVAFHVIDAHMWGFRDACVEHHLQRGQGVPGKAFISHKPCFSKDIRKFCKLAYPLVHYARMFGLAGCFAICLQSSYTGNDDYILEFFLPPDCSDEDDQNALLESVLTLMKRCLRSLKVVGDRDLSGVSLHLSNVLKLENEEFKTDAQFDNSDGSLCQSPNGDRHGGSHEFDGGNKKVLDVPEGQLLTDDFSQGNGTSAGRPNGSGASDSSVLHKTNKPPERKRGKAEKTISLEVLQQYFSGSLKNAAKSLGVCPTTMKRICRQHGISRWPSRKINKVNRSLSKLKQVIESVQGSDAAFNLTSITGPLPIPVGPSLDSLNVEKLTQSKVAELSNIAVDGDRDSLQKSLGNDGHFGIVMPQQGSTDHNNDTQLEADKASHSRSSSGEGSINSRTSEGSCQRSPANQTFVCKPIASTFAEPQLNPEEFNKEPFQEPQLPLSRMLIEDSGSSKDLKNLFTSTSDQPFLAPPNNLVPMKHSGSVTIKASFKEDIVRFRFSCSGSVIVLKEEVAKRLRMDVGTFDIKYLDDDHEWVKLTCNSDLEECMEISRLSGSHVIRLSVSDIATHFGSSCGSSG

SEQ ID NO: 3449 - protein, 393 aa, Zea mays
MAASSSEAATATPTTTVGLGGSGTPGPPPPTPSNHHAAPSSAAGGATDASLSAFLHRLLLSSPAPQLRSPLAARSQASPPSLPPLVSLESPDQRALRNAADVGYFHLAGHGIPSGLPSSALAELSRIDASTRLESNLRTLGFSVEEGEEQDVDGGADDPAVVFDACEGDLDALPAAAEYARRMKDVGMRVVALLSGCPDTGFREKPFAEGRRKPRCLLWASRVSTADTAPPAVGKAKAYPYVVALHCQWEASGQEEAPPSWVMNHGGEWTAVAARDDAMLVTVGDIAQVWSNGKLKKVRGMARPTSAPPMAAQHGETDRLSLTVLITLPLDNIVSPLVPLSNAAGEGREAEANGAGADDEDGWRFHSFLLEDYAWRVYNQRLQFKDPLVRYRI

SEQ ID NO: 3450 - protein, 764 aa, Zea mays
MASAPCSNSSPAARAPRSAAAGNKKPTTCLCSPTSHPGSFRCSRHRNGAAAPGGEAAHGASRGGTAGRAAKGRRKVRPKTRLHADAVYPAWRVNPGYIFDALLVQAAAERARVVGRRAHAADDPASASPQLILHVVFVYAPLLDLPNGLMMMTCVDPILANASTTDIRRHGTATDPFRASQAAQFLRWKLEKAYMRLRRRERFVYRAAMDQSGIVVVELAEAHAVPVSGGPSARGPFKKPRTDETNGQEKTELSQPNRAHPRVRCTLYYSRDNELQHALRPKLSSDCEQAFLPPLVSVFAANIRSPPFSASGSHSPSTLLAQRSRTRAMAALCSASPAISAAASLGSPARVVASFLRLRLRLRAAKRSCSHAPAPSWRARRRFAAAAAEAEECSGVETLIPPDNRIPATIITGFLGSGKTTLLNHILTAHHGKRIAVIENEFGEVDIDGSLVAAQTAGAEDIMMLNNGCLCCTVRGDLVRMIGELVNKKKGRFDHIVIETTGLANPAPIIQTFYAEDVVFNDVKLDGVVTLVDAKHARQHLDEVKPKGIVNEAVQQIAYADRIIVNKIDLVKEPEVLSLVERIRGINHMANLKRAEYGKVDLDYVLGIGGFDLERIESAVAEKSHEDHAEHDHEHHEHENEHDHDHHHHHDHDHDHHAHDHTHDPGVSSVSIVCEGEMDLEKADMWLGNLLLEHSEDIYRMKGLLSVSGMPQRFVFQGVHDIFQGSPERMWEPNEPRINKIVFIGRNLNKEELDKGFKDCLLKK

SEQ ID NO: 3451 - protein, 492 aa, Zea mays
MEDGVSTYTVDEALVSMGFGKFHAFVLAYSGMAKISEAMEMMLLSFVGQSVQAEWGLSAHEESLITSVVFVGMLVGAYAWGIVSDNYGRRVGFNFTAIVTGGAGLLSAFAPNYLSLIVLRFMVGVGLGGGPVLGSWFLEFIPAPNRGTWMVMFSAFWTVGTIMEASLAWAVMPAFGWRWLLALSSLPSFALLLFYPVTLESPRYLCMKGRIAEAVHVLETMSRVNCVSLPSGRLVSGHRVELHDIGDSSETAQLVTSNKNNTADRGSKSEIGGLSAILKLLSPNLIRSTLLLWTVFLGHAFLYYGLVLLTSELNHGNRICGSEEGAEVTTTAHIHDENLYRNVFITSFGEVPGLLLSAAIVDMIGRKLSMSSMLYISCLCISPLMFAQTESLTTIFLFCARVCISASFTVLHIYAPEIYPTAVRATGVGFASSIARFGGILCPLVAVGLVHACHQMAAILIFITVMLASGIAVSYFPLETSGRKLSDHVAAA

SEQ ID NO: 3452 - protein, 226 aa, Zea mays
MQGDPGYGGYGYGYGYDVAGNGGGGGYYPANDRYPAAAYEDPLAGRRQPLLTGLEFEPSDTCPRNYVIFDQTYDRSRVMYHPSLPADNFDHQGYYSGESAYHGGGGSGGSVRQKEDTDEIDALMSTEDGGGDDDEDDVLSTGRTPGCRAAGSPDSTCSSGGGRKHEAPAGGEKKKERVKKMVRTLKGIIPGGDRMDTPAAVLDEAVRYLKSLKVEVNKADARGSGS

SEQ ID NO: 3453 - protein, 135 aa, Zea mays
MPRIRSGDLALAAQARKKPRRAGGRVSCSGPRRRARPQYDLPLPSPSVIVPGFPPASASDPHAEAGKLYDLRTPLRASGGLAPAAQARKKPIEPKAVRCVPALDAVLDHDTPFRFLRQVCSFLASFARVISESAT

SEQ ID NO: 3454 - protein, 401 aa, Zea mays
MASYSSRRPCNTCSTKAMAGSVVGEPVVLGQRVTVLTVDGGGVRGLIPGTILAFLEARLQELDGPEARLADYFDYIAGTSTGGLITAMLTAPGKDKRPLYAAKDINHFYMQNCPRIFPQKSRLAAAMSALRKPKYNGKCMRSLIRSILGETRAKSTPLKNALLSDVCIGTSAAPTYLPAHYFQTEDANGKEREYNLIDGGVAANNPTMVAMTQITKKMLASKDKAEELYPVKPSNCRRFLVLSIGTGSTSEQGLYTARQCSRWGICRWLRNNGMAPIIDIFMAASSDLVDIHVAAMFQSLHSDGDYLRIQDNSLRGAAATVDAATPENMRTLVGIGERMLAQRVSRVNVETGRYEPVTGEGSNADALGGLARQLSEERRTRLARRVSAINPRGSRCASYDI

SEQ ID NO: 3455 - protein, 224 aa, Zea mays
MTPLPAINTPPRPSVPTHNSQIESKHSPENPKSHSPVTARFSSRISSRVYLLLLLRRRNYPNGSLRRGRRHRRPPRRRRGGAGPGRHPDHSSQGRAQDGPAAATPCAVPGHRPGAGRQAADRRGAVPAGLSSGPAHRGPRRLCAVREGPDLVRLHHPGRRPHRRAFRQRRRLARLRPRLRRRRRRGRSRRHVLDASPRRRAVLFILSCFTFVRVCVGGSWVILS

SEQ ID NO: 3456 - protein, 196 aa, Zea mays
MAARIGCKVGQYNRGGPRLRELSRRRKTNYVTTNLRRVKKKRESNWQHRDSVEGEESRPWNTAPAKHRDGSEYEGGGAGQRKATDWEGKENTRLGAMAAGAEGGGVAGPSQGEQKFRWARPRISPVFACARWRWVPQMVAEQRGRRGGRGGSAWGGGWGSSEPSRSRRGMTCGRDWRSGLPASAGLAGAGGNAEIA

SEQ ID NO: 3457 - protein, 454 aa, Zea mays
MAPPEPEMFDVVIFGASGFTGKYVIREALKFLNASSSASPLRSLAVAGRSRDRIAAALRWAAAPAPPPEDVPILVADTSDPASLAALASRARVVLSCAGPFRLHGHAVAAACAAAGADCLDISGEPEFMERVESELHEPAARSGSLIISACGFDSVPAELGFLFHSRQWEPPSAPATVEAYVSLQSTKRIVGNIGTYESAVLGVANAGQLQALRRSRPRRPRPNIPGPPPPKGSLIEGHNPLGMWAMKLPSADTVVVKRTLSTLTEHPEGLPGAEETPEYADHRKKLWSSVKPAHFGVKIASRSLLILVRFIFTGIFIGLLANFSFGRSLLLKYPEFFSAGLFSRAGPTEEEVKSASFKMWFVGHGYSNVDSSLELGRSKPDKEVITKVSGPEVGYVTTPIVLVQCALVLLSQRANLPKGGVYTPGTVFGPTDLQQRLQDNGLSFEVNTTRAMH

SEQ ID NO: 3458 - protein, 346 aa, Zea mays
MDPVRKSVCVTGAGGFVASELVKLLLSRGQYAVRGTVRDPDADRETWECGTAFFLEVERSSRFFIKKGASKNAHLKVLEGAEERLQLLKADLMDYDSIASAVAGCEGVFHVASPVLSHRPSNPEVEVIAPAVIGTTNVLKACYEAKVRRVVVVSSCGAVYANPIYPKGKVFDEDCWSDEDYCRKKEDWYLVSKTLSEREALAFAAKTGLDVVTVCPSLVFGPLMQPTVNLSSEMILKYFKDLETVENVLSNMVDIRDVADALLLTYEKPEASGRYICSSHAIKISDMINILKTMYPSYPYPKNFVEDDVNSVYSSEKLQKLGWSFKPIEESLRDTVESYKAFGILN

SEQ ID NO: 3459 - protein, 147 aa, Zea mays
MARPWHSRPPRLPPSPWRGARSRPRRPRCGGPPARPQPRPDLGVARLAPARPARPATPVPHLASTPSLPCPARRRARAAPPWPARSPSSASARPNPSLHGALESPAPGPGIPPPRPDLARRCAQPHPGSAALAPRPQCGVPAASPAA

SEQ ID NO: 3460 - protein, 178 aa, Zea mays
MEEGLGRSREEEVEGKAEQRKPAMERELGGPWRGDWAPGASSCLGRAADQRAHQGARPRPSELQAGARDACARKWVNELGMRWRGEDARAAGDMAELGGGAEPMTSARQREEDARVREEELDRFLGKRGSRADWIGHAQGGALCTGARRGATGCRGEGGQEDERSARSAGEEDCARGR

SEQ ID NO: 3461 - protein, 486 aa, Zea mays
MTPCALTVDSLNPKVLALADHLGDNAIARRAQCIQNEIEAEPESHPFREIIDCSLSNPQSMGQRPNKFFREVLALCDYPHLLEQSGTNSLFSSGAIARAREILDLFPGRATGGYSHSQGTEGLRDIIAAGIAARDNFPCNADDIFLTDGAAPPVHMMMHLLIRDKKDGILCPVPSHSLYTSAMLLQGATLVPYFLDESRGWGVSMSDLKKQLDSARSMGVFVRGLVVINPGNPTGHVLVEENQREIVDFCRNEDLVLLADEVYQENIYADEKGFHSFKKIARSMGYGEGDISLVSFHSVSNGYYGECGRRGGYMEVTGFNSDVKKQVYKVVSLSSCSNISGQILMSLVMNPPQVGDESYASYQAERDGVLSSFARCAEAMVRSFNGLEGVTCSEAEGAVFVFPSVRLPKKAVAAAEASNTQPDAFYALRLLETTGIVVVPGSVFGQMHGTWHFRCTVLPHEEKKTMTVIISSFVAFHRAFMEEFRD

SEQ ID NO: 3462 - protein, 221 aa, Zea mays
MLASSLNPARSPWKGPPPPPRIRVPAILHLGSASASTLPARSPWKGPPPVDLAPTALVLYTGEKFPSKYLGQTSSPRISLAIHGSGPAPDSARVKGQYSAWAALSAALVAYRCLSGSPKNRLDMSAVVQALEPLLDLDDDVPMAPLGHADPVVLFVAAAAEENKERAPRKDVLGHRRRPMSPKASPRKHPSAGTKDEFWVWHLPADQKTRLSLGDVVQACA

SEQ ID NO: 3463 - protein, 301 aa, Zea mays
MCLLREMEDHYVHPKSKSNHGSLSGNGYEMKNPGHEVCDRDSSSESDRSHPEASAVSESSLDEHTSTQSDNDEDHGKDNQDTLKPVLSLGKEGSAFLAPKIDYNPSFAYIPYTADAYYGGVGVLTGYAPHTIVHPQQNDTTNSPVMLPAEPAEEEPIYVNAKQYHAILRRRQTRAKLEAQNKMVKGRKPYLHESRHRHAMKRARGSGGRFLNTKQQPQEQNQQYQASSGSMCSKTIGNSVISQSGPICTPSSDAAGASAASQDRGCLPSVGFRPTANFSEQGGGGSKLVVNGMQQRVSTIR

SEQ ID NO: 3464 - protein, 462 aa, Zea mays
MSGVGSGRPPAAQKILQSLRPPLSFSTPSRPPFAAPDDYHRFPTPAAATSPAATSGGVGAGAAPPDTVEEGLVIRTPLKRKATSEENAAADSSSCIITSPMLTPVSAKTVKASKAKAKNSKTGPQTPTSNVGSPLNPPTPVGTCRYDNSLGLLTKKFINLLKQAPDGILDLNNAAEVLEVQKRRIYDITNVLEGIGLIEKTLKNRIRWKALDDSSVQLDNGISALQAEVENLSLQEQALDERISDIREKLRGLTEDENNQRWLYVTEDDIKGLPSFQNETLIAIKAPHGTTLEVPDPDEAGDYLQRRYRIVLRSTMGPIDVYLVSQFDEKFEELGGVATPAKHSNVPRHQPAEDFNTSYAGQSSTLMGVAHDAQHSQKIPQDPSALHDFGGMTRISPSDVHTDSDYWLLTEGDVSMTDMWKTEQAQWDEMDFLSEDVVTPRAHNQQLVTVDGPHMEVPSTDP

SEQ ID NO: 3465 - protein, 1019 aa, Zea mays
MEEATRRRITPTTTLLLALAVLAASVPAGFCAINPQDASALNAIQSQWTNAPLSWSSASDPCDGGWDGIMCSNGRVTSLRLSSVNIQGTLSDSVGQLTQLMYLDVSFNLGLNGRMPATIGNLAQLTTLILAGCSFTGAIPQQLGNLQQLSFLALNSNKFTGTIPPTLGLLSNLFWLDLADNQLTGSIPVSTATTPGLDQLTHTKHFHFNKNQLSGTLTGLFNSNMSLIHILFDSNQLTGPIPEELGGISSLQVLRLDRNSLKGTIPPNISNLVNLNELNLASNQLTGPLPDLSSMTKLNVVDLSNNSFAVSAAPNWFTTLTSLTSVSISSGKLSGAVPKGLFRLPQLQQVVLSNNEFNGTLEVTGNISSQLQAINLMNNGIAAANVTPSYNKTLVLLGNPGCVDPELKVFCSLKQERMIAYNTSLAKCSSTASCSSDQRLNPANCGCAYPYAGKMVFRAPLFTDLTNSATFQQLEASFTTQLSLRDGSVFLSDIHFNSDNYLQIQVALFPSSGVSFSVADLIRIGFDLSNQTYKPPSNFGPYYFIADPYALLAGASSRGSKKSHISTGAIAGIAVAGGILVIALIGMVLFALRQKRRVKEVTGRTDPFVSWGVSQKDSGGAPQLKGARLFSLNELKNCTNNFSDTHEIGSGGYGKVYKGTLVDGTRVAIKRAERGSMQGVVEFKNEIELLSRVHHRNLVSLIGFCYEQGEQMLVYEYVSSGTLRENLLGTWTKPPVHRIYIQHFTEFPSPSSVVIVASVVHSTICVRMHERPPCSERNVPGLEEEAQDRARVSEGTCVPSRARRSAYHPPGRQVHQYPPRRPPQSQGRRLRPLQARRGHPEGPRLHASERNAGLLGSGVLHDAAAVGEERRVQLRGGDAGAGERAAADRERQVHRARGQAGHRPQRPRPLRAAGPPGPGDPGQRAHRRVQAVRAAGDAVRGRVGGGAAGHGRGGEGHRGHAAERGLRARRGHQLRRLLRQRLRRRRRRSEVAPVQRRRDHERLVRGQRVGLHAVLRGQA

SEQ ID NO: 3466 - protein, 130 aa, Zea mays
MVAKAKANQMEERRNDDGTLVEPVITVSGLGRLPNTLTCTCGFLLHGVAHINSLCLPDCTKQRRKQSIQHGQCRKSNDEVADDEHKKKGGRQRGQKSGYCKSKDGVGAIKVKSPKRQSNLQKGYVKHVDD

SEQ ID NO: 3467 - protein, 748 aa, Zea mays
MRTQRNLLPLLLLLSAALLAVADAQERKNYVVHLEPRDDDGGGGSVEEWHRSFLPEATLDSAADDGPRIIHSYSHVLTGFAASLTDAEAQTLRRKEGCLRLYPEEFLPLATTHSPGFLGLHMGKHGFWGRSGFGRGVVIGLLDTGILPTHPSFGDAGMPPPPKKWKGACQFRSVARGGCSNKVIGARAFGSAAINDTAPPVDDAGHGTHTASTAAGNFVQNAGVRGNAHGRASGMAPHAHLAIYKVCTRSRCSILDIVAGLDAAVRDGVDVLSFSIGATDGAQFNYDLIAIATFKAMEHGIFVSAAAGNDGPAAGSITNGAPWMLTVAAGTTDRAIRTTVRLGNGQEFHGESLFQPRNNTAGRPLPLVFPESRDCSALVEAEVRGKVVLCESRSISEHVEQGQTVAAYGGAGMVLMNKAAEGYTTFADAHVLAASHVSHAAGSRIAAYARSAPRPTASIAFRGTVMGSSPAPSVAFFSSRGPNRASPGILKPDITGPGMNILAAWAPSEMHPEFADDVSLPFFVESGTSMSTPHLSGIAAVIKSLHPSWSPAAVKSAIMTSSDAADHAGVPIKDEQYRRASFYSMGAGYVNPSRAVDPGLVYDLGAGDYVAYLCGLGIGDGGVKEITGRRVACGGKRLKAITEAELNYPSLVVKLLSRPVTVRRTVTNVGKASSVYRAVVDMPSRAVSVVVRPPTLRFDRVNEKRSFTVTVRWSGPPAVGGVEGNLKWVSRDHVVRSPIVIPPAKATA

SEQ ID NO: 3468 - protein, 185 aa, Zea mays
MRATKLGQALVAGRHGEQQEAARRREERSRRAAVRAERDRAGPQLGKERLGAPWESRARRAGPETRTEQGTRGWRRERRWRESAVARELHGRTVVLSAASSIDPCSHQRKHRTGGSSLGGAEEGAEGARRRRREEGDEGAPAMEQRRTAREIHEVGKKTLEMGAQRARAEAHAGEEEDAGCRGSS

SEQ ID NO: 3469 - protein, 123 aa, Zea mays
MRQNYWNGGVVNVVVVEAIDVDTHGKNDDDASLTHVEQYVSEVQRRGLSRADDAVVEIKGGDHRELVYGKVEKKADTTNSQVREHDQNRDMGVAMIIGAGNKGRGERPIGITGTTNKTKPTRW

SEQ ID NO: 3470 - protein, 87 aa, Zea mays
MEPWPAPRPWLVLAGALFGGSSGAVWRSVPYCHGTQGVQKYAGPLHVHQHAGTHGERTAGRRRNDLGSARSGASVQAQDAEVLEMLC

SEQ ID NO: 3471 - protein, 840 aa, Zea mays
MSGSGSGSGGGGARGQSGPVPASARKLVQGLKEIVNRPDAEIYAALRECGMDPDEAVSRLLCQDTFQEVKSKRDKKKEVKETLDPRSRGASNSCRSSRGGMDRAGRSSSVQSGSSGTDYVTSRSSILGPAVPVKPTVPSLSTNKDVVFNGSVGAPQSSSGFQHNWFGVPGQMSMADIVKMGRPQVRSSGKPMAAADTSYAGQTPSLSSSVNQNSKQSASTTLPTTFDQGFPALPDPIPHTVNSSHGSAGNNHTHENDWFPQDEPQSGVQSTGIEASGDQSLSVASLDQSMLVAGTAYSQENSHAEENNSTAVKATVSSERHLEIVEEDNHYNDGLLQNCAYQAQVHSYVDNEVGVSNVDAESAVANFQHLSLQNEDIVVTKSEDNHAVILPDHLQATNADCAHLSFGSFESGAFSGLFSSKVTKDSLEDNEVHIPDESPSVNLDARNQDYYDNDALNLSANEDVETRIGTNMDNIDGPSVSQSDVPRQGAIDVPGLQYDMPSVPSHAYSSTTQPSKMEDPQGNTQAQPLSHFSGLLQANTLPNYLLGSNLTPIREFDFSQLLQTQSATKYNPSAAPNNLPAISMQETLKPGGFPNTQSTQHVPNTSIPSGLPLPQQLPVYSQPTLPLGPFTSLVGYPYLPQNYYLPSAAFQQAYSSNGPFHQSGAPAVPGAGMKYSMPQYKSSPPASSLPQPSSLSGYGGFGNANNIPGNFSLNQGAPSAPTTLGFDEALGTQFKDPNHYAALQQSDNSAMWLHGGAGSRTVSAVPPGNFYGLQGQSQQGGFRQAHQPSQYGGLGYPSFYQSQSQASLPQEHPQNLTEGSLNNSQGVPSQPSHHLWQHSY

SEQ ID NO: 3472 - protein, 468 aa, Zea mays
MDHVVGGKFKLGKKIGSGSFGELFLAVNVQTGEEVAVKLENVKTKHPQLHYESKLYMLLQGGTGIPHLKWFGVEGDYNVMVIDLLGPSLEDLFNYCSRKFSLKTVLMLADQMINRVEYMHQKGFLHRDIKPDNFLMGLGRKANQVYIIDYGLAKKYRDLQTHKHIPYRENKNLTGTARYASVNTHLGVEQSRRDDLESLGYVLMYFLRGSLPWQGLKAGTKKQKYDKISEKKMLTPVEVLCKSYPSEFISYFHYCRSLRFEDKPDYSYLKRLFRDLFIREGYQFDYVFDWTILKYPQIGSNPRTRAGERTSGAAGPSMDRIEKTPGEASGRRNPSGPVNQSDSYAQRPRETVSMSLKEIMHSTDRSGERTVERPRTSSRTGSASRRAVASSSRPATSSMEPSEQQYSRASRLFSSNSGSRPSSAQRVNPAPGESRATSLSRAAVARGSRDEPLHRSLELLSLGSGKRK

SEQ ID NO: 3473 - protein, 1264 aa, Zea mays
MASRRASNGRSPLVRKQSQITAFFSSPTPSPSPSGPSPGASKPSPSPLNPSARTRSPLAAVSPSSPKLPQPQQKQKEVKKVKEEHDAALVPAPAAAEVVGRCLRVYWPLDDAWYKGKVEAYDAASRRHRVKYDDGDEEEVDLRKEKFEWAAVVEESTLLPARKLRRLRRMSDISVAKSPAEAEDGAGDSTEDEDWKRDTVVEDASEEVELDEEDEEEVVAVRSRKRNPKNSLMSGSTPSTLGSGLTSESEPRISKRRKNVDVASLDFAKRFTFEAVNTNRKVDPEVPMSCGQKGQTTGNDYTAPTGDAAERFGQRDAEKFKFLGEGRKDAKGRRPGNPGFDPRTLLLPPQFLKNLTGGQRQWWEFKSQHMDKVLFFKMGKFYELFEMDAHVGAKDLDLQYMKGEQPHCGFPEKNLSVNLEKLAEKGYRVLVVEQTETPDQLELRRKEMGIKDKVVRREICAVVTKGTLIEGEHLLANPDPSYLLSVTESYQRSPNKSQDTCTIGVSIVDVSTSKFIVGQFQDDPERHGLCSILSEMRPVEIIKPSKMLSPETEKALNNNTRKPLINELVPSTEFWDAEKTIDEIKQYYSSANKQKKADDIQDCVDCLPNLLRELIGAGDKTYALSALGGSLFYLRQTLLDEKILPCAEFEPLACSGFINNIRKHMILDTAALENLELLENTRTGGLSGTLYAQLNHCVTGFGKRLLKRWIAKPLYDRREILRRQSAVATFKGVGQDCAAQFRKDLSRLPDMERLLARLFLKLMFHACSSISTLICSEGSQLIDLLSPGKGLSNISSILDRFRDAFDWSEADRNGRIIPSEGCDPEYDATCNAIEEIKSSLKEYLKEQRKLLRPASVNYVNVGKDMYLIEVPESLGGSVPRNYELQSTKKGFYRYWTPELKELILELSKAESEKESKLKAILQNLIQLFVEHHTEWRQLVSVVAELDVLTSLAIASGYFEGPSCCPTIKESNGTDDTPTFHARNLGHPILRSDSLGKGSFVPNDVKIGGPGNASFIVLTGPNMGGKSTLLRQVCLTIILAQIGADVPAEKLELSLVDRIFVRMGARDHIMAGQSTFLVELEETASVLSSATKNSLVVLDELGRGTSTSDGQAIAASVLEYLVHQVQCLGLFSTHYHRLAMEHNDTKVSLCHMACEVVEGVGGLEEVTFLYRLTPGACPKSYGVNVARLAGIPTKLLQRANEKSSEFEANYGKRHKMTNDKHVSAQSDDKFSAIRDLFRIVKTWPRPEDQEASISMLRKLQKRAKV

SEQ ID NO: 3474 - protein, 349 aa, Zea mays
MARQQPERVPPQRRPVGCGGGWKRDGVCGSPPLSGGLFAAATSASSRSECRRSGVLSVVEPAPERRAVRGVPRGGPEDALLTVCPWDPRVRGGTLFHQTTFSLPVRRAVLFVAEVHRLRDLEPRTLCGVELYDGILMRYVKASTAYLGKPAPRGEPSGDMVDFDITYYRSRDPGRARLFEDVLEEVEQMGIIKYGGLPHWGKNRNLAFVGAVRKYPGLPRASTPACRASCASRTPTTPMASSPAAAASAAASCAHWSCSWSTTSVSGASAAGGARTEESGSRTRRSAAARSPGTSGAMASRGCSPGDERQQPERVPPQRRPVGCGGGWKHCGVCGRACGRMRGRFTLLT

SEQ ID NO: 3475 - protein, 583 aa, Zea mays
MAGASNHGSLTDEWLPPPTPSPRSLVSSFLNEEFSPGPFSGLFSKHGANRPHDQSEKGRGALNSSEEFPTHAVKDPFQKGFSLEPNLFSANHISNSNGGLAERRAARAGFSVPKIDTSRVGSSAVIRSPVSIPPGLSPTTLLESPVFLYNKMAQPSPTTGTLPFLTATNDKSTIPPATKITEDSAVYNDVFSFQPHLGSKETGFSTAEKDYGAYQQKHSLWNIHQQESSLQSSFTAVKDNTSATIGETKTSSSMFSDSHYSADQQQGEETNMKEQGKGVEARSAAFLPAPVHNDASLLDSQDAVDVSSTLSNEEDERATHGTVSIECEGDEDETESKRRKLELDALGAIAIATTSTTSTIDMGPASSRAVREPRVVVQTTSEVDILDDGYRWRKYGQKVVKGNPNPRSYYKCTHPGCSVRKHVERASHDLKSVITTYEGKHNHEVPAARSSGQGSSGSGSGPSAPQAGGSHRRQEPAQASFAHFGTSPFSSFGLAPSGQLGPTTGNFRFGMVPPGATIPMPSLGSLAPTKMIGNPSAMQGYPGLMMPGEPKVEPFSRPHFPTSIAPPPAYQQILSRPPFGHQM

SEQ ID NO: 3476 - protein, 814 aa, Zea mays
MASLSESELTNRGTMWELDQNLDQPMDEEAGRLKNMYREKKFSSALLLRLAFQSLGVVFGDLGTSPLYVFYNIFPRGIGEGEDEDVIGALSLIIYTLTLIPLLKYVFVVLRANDNGQGGTFALYSLLCRHAKINTIPNQHRTDEELTTYSRQTYEENSVAAKIKRWIESHAYKRNILLILVLIGTCTAIGDGILTPAISVLSASGGIKVQNQNMSTDVVVLVAVVILIGLFSMQHYGTDKVGWLFAPIVLLWFILIGSVGAINIHKYDSSVLKAYNPMYIYRFFRRRKNSDVWTSLGGIMLSITGTEALFADLCHFPVLAIQIAFTLIVFPCLLLAYTGQAAYIISNKTHVADAFYRSIPAAIYWPAFIIATAAAIVASQATISATYSIIKQALALGCFPRVKIVHTSKKFLGQIYIPDINWILLVLCIAVTAGFKNQSQIGNAYGTAVVIVMLVTTFLMVPIMLLVWKSHWILVVTFIVLSLMVEVPYFVACILKIDQGGWVPLVVATAFFLIMYVWHFCTVKRYEFEMHSKVSMAWILGLGPSLGLVRVPGIGFVYTELASGVPHIFSHFITNLPAIHSVVVFVCVKYLPVYTVPTEERFLVRRIGPRDFHMFRCVARYGYKDLHKRDEDFERMLFDCVLFFVRLESMMEGYSDSDEFSVPEQAPPGSGSGSGRGGPAAAFLQGGERTCSTMCSNGELSFSSQDSIVPAAQSPAPRGLRLLQCSASASASAGQAGSCGTVGDELEFLNRCKDAGVVHILGNTIVRARRDSGVVKKLAVDYMYAFMRRMCRENSVIFNVPHESLLNVGQIYYI

SEQ ID NO: 3477 - protein, 112 aa, Zea mays
MRPRRDPTRSALALSSPAPSSPSPTAPAPGRARLGSPAPGRARPRLARPELAPTPTALNPARPGHGGPCPVAPAPVPCPGVVAGRGLAGHGARATCPAPARARPPRRVLLAS

SEQ ID NO: 3478 - protein, 184 aa, Zea mays
MEEWNYAGRGAGFLRDVHGRGIRPWRAPGRGRAQPRQAQGRGGRCCCCFWIEELGAGNLDAMDREVENTMAGACGAGRRGSGRSLAGQGRAGEADAMEGGEQREPGENGSQGELTAMEKIIGQRGARPCPGTGAMGKLELAGRGTTICCRVRAGAWRREMPWRQQRASAKPCRTPARSWFPCEN

SEQ ID NO: 3479 - protein, 716 aa, Zea mays
MECDNGRVAATNGDSLCMALPRAADPLNWGKAAEEMMGSHLDEVKRMVAEYRQPLVKIEGASLRIAQVAAVAAGAGEARVELDESARGRVKASSDWVRDSMMNGTDSYGVTTGFGATSHRRTKEGGALQRELIRFLNAGAFGIGTDAGHVLPAEATRAAMLVRINTLLQGYSGIRFEILEAIVKLLNANVTPCLPLRGTVTASGDLVPLSYIAGLVTGRENAVAVAPDGTKVNAAEAFRIADIQSGFFELQPKEGLAMVNGTAVGSGLASTVLFEANVLAVLAEVLSAVFCEVMNGKPEYTDHLTHKLKHHPGQIEAAAIMEHILEGSSYMKLAKKLGELDPLMKPKQDRYALRTSPQWLGPQIEVIRASTKSIEREINSVNDNPLIDVARSKALHGGNFQGTPIGVSMDNTRLAVAAIGKLMFAQFSELVNDYYNNGLPSNLSGGRNPSLDYGFKGAEIAMASYCSELQFLGNPVTNHVQSAEQHNQDVNSLGLISSRKTAEAIEILKLMSSTFLIALCQAVDLRHIEENVKSAVKSCVMTVAKKTLSTNSTGGLHVARFCEKDLLQEIEREAVFAYADDPCSANYPLMKKLRNVLVERALANGTAEFDAETSVFAKVAQFEEELRTALPSAVEAARAAVENGTAAIPNRIAECRSYPLYRFVREELGAVYLTGEKTRSPGEELNKVLVAINQGKHIDPLLECLKEWNGEPLPIC

SEQ ID NO: 3480 - protein, 216 aa, Zea mays
MGISHSLLKPSDNPLYGFGGKGTFPVGKIELPLSFGVAPNARSEQVTFDIVDMVYPYNAIMGRGSINKFEAAIHGLYLCMKIPGPLGAITIYGNQQTARNIERDFVPGQRNVHCLTTQREAPAPASPTDKQHDKAQLQSQDGTKTVPLDQATPKQTVTISEDLTSLEEERLLCCLAKNKDVFAWSALDLVGVSRSIIEHSLGIDPSVRPKKQRLRK

SEQ ID NO: 3481 - protein, 706 aa, Zea mays
MARNVYTLRPCFCSLASFSRSPVPSRALYLFLVATTWRSPLPPCPGLYFGTFTGDEHPSGCFAKLPTSRIQLITIPSTLSRFIGGCTEPIQQGVSDILMDGVPNILEKSSHECMYSWYFTREELEKFSPSRKDGITENKESEIRHLYCSFIRDVGIRLKLPQMTLATAVMLCHRFYLHQSLAKNGWQTVATVCVFLASKVEDTPCPLDHVVRVAYETMYRRDTAAAQRIRQKDVFEKQKALILIGERLLLTTIRFDFNIQHPYRPLLDAMQNLGINQKEVKQVAWNFVNDWLKTTLCLQYKPQYIAAGSLYLAAKLHNIKLPLHGAHVWWHQFDVAPKPLEAVIHQMMELAALKKLMPARPNPVKLKETLCEAKLSLSNSPDSVLNQSNLLISSSSPDIGEPSDKVQVDSCQYLISSHMGDCRVSGPDSSSLNTCANRNVSCKAHDEESLDQALIIKHDSGMMPSSNQTSLYATVGTEGSAELKQDVSHCNDFNIRVNDESLNQVLRNQHGDAIPLPDVVSLDAKVDKERSWCVEPLIANSDCCTDSVNVDSLCTDQRLADAPSGPTADAPSMLAEEESYPFSAKLENIDVARIKGLLMKRKSRREIQDRAIASDGLSEEDWIERELESGIVTNQEANCAAISDELSDEAWIERELESGIVVGPRNEQAITFDGLSEDDWIERELESGIIVEPAPATKKRKLESSC

SEQ ID NO: 3482 - protein, 1378 aa, Zea mays
MPAPPSTEAGRSRTMTRVIILLDSDKEDDGTGRQAGRELGGAAIASAGEASKLVKPEVVDDVGSNPVRPGALPTSLRVQGHRAPSSPSPVPAAVRKQPEIIAISDEDNDGSRFRRVRRVKDEASDWVLSAKAKRAMVSGVPPGSSDVKRKRKRGSSGAGDFHALDRNLSASGAGRRTSWMAEDAGSSRNVSSSELSRGGVGDRSGSTKKARGAPGKTRRGGGTRRERSTSAAPANLVGGSATVGSRIRLRSRQQGRVQCATYSARVSSEDTGEDEKHMQEQTRVEDVEFMEVDDDYDDVNVAGNVIDQESEQDEALEGRSSQDSHGYSEDKEGKDSAALSDNEEDVGGKELLEEEEEGADQEESHIIYDGEGEQEEDASEEETQELDETGEAQPFNPSNTMAGSTMRSGGDGKQVFRRRVFEGIYLPENPHRTVGKGIQGRTRSQRKCKDKKLLKRGTFSKPYNIDIPDSTSDSEEEIEPPAPQQGLLSSSEEDNMTFGKRKRRRAAINKRWDKRLSASSDEEDYGASAMDAKERPFRRLKKGLSNLQAAKEGCRNYEGSNPGHARYSGPNGGNLENMSSAQDDISFKRNVHMIRIKKRGRAAKAVYDELLDSLFSGWENHIGNPVHAEAGNSLPLVFSFGDEDAEENTENDKYQEQEDLWMECGIAFQSMNIGSNGCEEDGKEIPPVKVTSCNIGQHEFIIDEQIGVRCKHCHVVDLEIRDVLPTLGKCSAERGSAINPEFDRMLKEMLNVFEQNDVLVSNGHELPCNFGDHKAGSVWNLIPGVKETMFPHQQDAFEFMWTKLAGGTTIEQLKHTIKSDAGGGCVISHAPGTGKTRLAITFVQSYLEVFPHCSPVIIAPRGMLATWEKEFRKWKVKLPFHVLNSTEINWSEDKTLQEQAAKNGTFHRRLLTDKMDQNYRRLVKLGSWMNGTSIIGLSYSLFRKLANHEGMDGDKVRKLLLEKPNLLVLDEGHTPRNKKSLIWKVLKRVHTEKRIILSGTLFQNNFEELYNTLRLVRPKDADALHLETDESKDFWSSLRLNDITKANINEVRKKLDPIVHIHSGRFLQKSLPGLRESVVILNPLLYQKEVIASMEKTVAMGLDAEYKISLASIHPSLLASAKLSMKEESILDKPKLESLRSNPSGGVKTRFVLEIVRLCEALNERVLVFSQYLEPLSLIMEQLKERFSWAEGEEILLMSGKVLVKKRQTMMEVFNNMKSKAKVMLASTKACCEGITLVGASRVVLLDVVWNPSVGRQAIGRAYRIGQRKIVYTYNLIAEGTTEKRKYDRQAKKEHMSKLLFSNELERGGCNLPPELTFNDRVLEELTAREDLKNLFVKIYVDNQTDGSRDTGYNDVVFFFVDGCRRDEEQYMFAVLII

SEQ ID NO: 3483 - protein, 606 aa, Zea mays
MQDGGEVLFLDGVGEVAVTIGRNGLSARPLHPELISSCWSSITLQPKLDSKINFSDVYAIEMLDKGRICGPWNTKTAIQGKKNIEMHRFVVHGITRRRKHPSPWVPCEYIFGHKDLKICKDWFQHLISCINNESGRPKNLMVFVHPLCGKGRGVSNWETVYPLFARAKIKTKVIVTERAGHAYDTLSSLSDIELKAFDGVVAVGGDGLFNEILNGILSSRHKVSYPPTPEGFGYVGSSDNCEEQTRNWVNFSKPTPDSGNAVFLGNPSKCDDQEPLLSTSHPTELEIPSNSTKEPCIGDQDNPVSFPNDWFRLGIIPSGSTDAIVLSTTGERDPVTSALLIILGRKVSLDIAQVVRWKTSPTAEVLPTVRYAASFAGYGFYGEVIRESEKYRWMGPARYDFSGTMVFLKHRSYGAKVAFLDTPYTHSLTASAQDDITGAQPLQSRWKKPRKIICRTNCFVCKEASTSGQNPEDVADNSRTICENQKWVWSEGHFLSVGAAVISCRNERAPDGLVADAHLSDGFLHLLLIRDCPLPLYLWHLTQFTKKGSDPLSFKFVEHHKTQAFTFISSHDESVWNLDGEMFQACEVSVQACRGLVNFFASGPEL

SEQ ID NO: 3484 - protein, 121 aa, Zea mays
MSAASQTFSTSTNLMFGRTSPRDLDDGGEDDFFYSVGGGTNGNDDEAVKLTVADSSDDFDELSGGGPRDIVRLYTLVRRFPPSEADDSFIFTTVQVTEGLKASGQARERTERRVTSKQARE

SEQ ID NO: 3485 - protein, 93 aa, Zea mays
MAHLIMTITSHWHKTLAIFTSKYYAKHIRAVFKCIVVQGLKQLFTCIYLLSSHPWPLASWSDIADDSLSPFKDSGTGLHLHAKIERRKHELRG

SEQ ID NO: 3486 - protein, 299 aa, Zea mays
MAGAAARRPGAKPRGGGGAGKRSAWLAADGSKRWGEAFFLLYTPFWLTLCLGVVVPFKLYERFTELEYLILGLVSTVPAFVIPLFLVGKADSVRNFKDRYWVKANIWIIIFSYVGNYFWTHYFFTVLGASYTFPSWRMNNVPHTTFLLTHACFLFYHMASNMTLRRLRHSTAHLPQSICWLFEAAWILALSYFIAYLETLAIANFPYYEFVDRDIMYKVGSLFYAIYFIVSFPMFSRIDEKDEKWSLSRVAVDSLGAAMLVTIILDLWRIFLGPIVPVPESRQCGQPGLAWFQAQNGST

SEQ ID NO: 3487 - protein, 379 aa, Zea mays
MALAVRTPRFQPRPASISAPTTPASTSLAAGNARPRPCAGAAVRASPFTEATSSSRYRRDAWSYAADGSSNSASPSSAAAAAAGRRDDEIALQLPELRRLLDVLRASRGRGAEEGGGPGRVALVGTGPGDPELLTLKAVRAIEAADLVLYDRLVSNDVLDLVGEGARLLYVGKTAGYHSRTQEEIHELLLSFAEAGANVVRLKGGDPLVFGRGGEEMDFLQQQGIKVEVIPGITSASGIAAELGIPLTHRGVATSVRFLTGHSRNGGTDPLYVAGNAADPDTTLVVYMGLSTLPSLAPKLMKHGLPPDTPAVAVERGTTPQQRTVFASLKDLVDEVKSADLVSPTLIIIGKVVSLSPFWVESSEHDALKVQSSYANEAR

SEQ ID NO: 3488 - protein, 148 aa, Zea mays
MEKGFGCPPWLPGSQARQGFAPGAEHGRSGRGRRSGEDGGQVGLLDGIHGKAGVAGLEKGRKPDGRGSVRAESKQGAQAKGTSSPARARTLRNALRAVLEMEILGLVPWRRSTLEEGRRNRGASLLCAPWRPWAREGRPGIHRWSRGT

SEQ ID NO: 3489 - protein, 527 aa, Zea mays
MTLSGMAVAFKASTSSVTQQHWSSPTKDQCQYGFTHLSRQKCRKRALCVTAISGKLDLDFTDPSWNQKYQEDWNRRFSLPHINDIYDLEPRRTTFSLKKNRIPLGDGDGSSTDMWNGYVNKNDRALLKVIKYASPTSAGAECIDPDCSWVEHWVHRAGPRKEIYYEPEEVKAAIVTCGGLCPGLNDVIRQIVFTLETYGVKNIVGIPFGYRGFFEKGLKEMPLSRDVVENINLSGGSFLGVSRGGAKTSEIVDSIQARRIDMLFVIGGNGSHAGANAIHEECRKRKLKVSVVAVPKTIDNDILFMDKTFGFDTAVEEAQRAINSAYIEARSAYHGIGLVKLMGRSSGFIAMHASLSSGQIDVCLIPEVSFTLDGEHGVLRHLEHLLNTKGFCVVCVAEGAGQDLLQKSNATDASGNVILSDFGVHMQQKIKKHFKDIGVPADLKYIDPTYMVRACRANASDAILCTVLGQNAVHGAFAGFSGITSGVCNTHYVYLPITEVITTPKHVNPNSRMWHRCLTSTGQPDFH

SEQ ID NO: 3490 - protein, 210 aa, Zea mays
MDLVPHPDSPHSDNSGGGGGSASGALSPGASSAGAASALASPSRYESQKRRDWNTFGQYLRNHRPPLSLARCSGAHVLEFLRYLDQFGKTKVHTPACPFFGHPAPPAPCPCPLRQAWGSLDALVGRLRAAYEENGGRPENNPFGARAVRLYLREVRDHQSRARGVSYEKKKRKKAPAHPVPAAVISSSHDGNGHHYEHQMPPPPPPGAAA

SEQ ID NO: 3491 - protein, 405 aa, Zea mays
MGCFSTFCKKRRATRQPSSHHNEDVPGCSNITKYTYKELVRATNNFNPLNKIGEGGFGSVYKGQLRNGTVIAVKVLSSESRQGVREFLNELVAISDISHDNLVKLYGYCAEGDQRILVYNHLENNSLAQTLLGSSHSNIQFDWKTRVNICLGIARGLAYLHHGVSPHIVHRDIKASNILLDRDLTPKISDFGLAKLLPPNATHVSTRVAGTLGYLAPEYAIRGQVTRKSDVYSFGVLLLEIVCGRSNSDTRLAYGDQILLEKFPEITNGALLLQTWMHYEQGSLERIIDRSLGGGDLDVAQACRFLKVGLLCTQDVTRHRPDMPRVVAMLTGEWDVEPETVSKPAIISDFMDLKVRSTRKASDNVATPPTSSSTFLSSLMAHSSPLLSNESTQASMAFTGVSDRE

SEQ ID NO: 3492 - protein, 90 aa, Zea mays
MAAVRSLLRSSASLLRAAPALARSSATTRPSLRRALAAPPRLLRSPVESSFCVESLLPLHTATAGARMTSMLAAPGQGLGWLTQAETDGV

SEQ ID NO: 3493 - protein, 443 aa, Zea mays
MAAPSGGGGGGAGEGSSSAAAAATIGVHGVDQVAEAMWQMNLEEAMELGPYPERVGEPDCSYYMRTGMCRFGMTCKFNHPADRKLAVAAARMKGEYPQRIGQPECQYYLKTGTCKFGATCKFHHPREKAAMATRVQLNELGYPLRPNEKECAYYLRTGQCKFGSTCKFHHSQPSTMMVAVRGSVYSPGQSATSPGQHAYQGAVTSWPLSRSASFIASPRWPGHSSYAQVIVPPGLVQVPGWSPYTAQIGSSSSEDQQRTPGAAQYYTGSRQSGTSIGDQGMFSSYQAGSVPVGLYAVQRENLFPERPDQPECQFYMKTGDCKFGAVCKFHHPRERIIPTPNCALSPLGLPLRPGEPICSFYNRYGMCKFGPNCKFDHPMGNAMYGQAPSPASEAPAPRRMLAHVPPSHPEASPDGGSGRSRRIAHSDSQQIPSGERSAEREAS

SEQ ID NO: 3494 - protein, 209 aa, Zea mays
MERKAVVVCAVVGFLGVLAAALGFAAEATRVKVSDVQTSGSPGECIYPRTPALALGLISAASLMLAQSIINAVAGCICCKKHPVPSDTNWSIALISFIVSWCTFIISFLLLLTGAALNDQRGEENMYFGSFCYVVKPGVFSGGAVLALASVALAIVYYVALSSSKGPPPAFAAPQNQGIAMGQPVIIPQQSSEPVFVHEDTYNRRQQVP

SEQ ID NO: 3495 - protein, 619 aa, Zea mays
MKFMKLGSKPDAFQSDGADVRYVVSDLATDVVVHVGEVKFYLHKFPLLSKSGKLQRLVLKAAEDETDEVRIDDLPGGAKSFEICAKFCYGMVVTLSPHNVVAARCASQYLEMTEDMEKGNLIFKIEVFINSSILRSWKDSIIVLQSTKALSPWSEELKVVGRCIDAIASKTSADPANVTWSYSHSSKKGGACAEIVEPAGKPSIAPKDWWVEDLCELDVDLYKRVMVAIKSKGRMSPELIGEALKAYAVRWLPDSYDALVAEDYMRRNQCLVETIIWLLPSDKSSGCSCRFLLKLLKVAILVGGGEHVKEELIRRISFQLHKATVKDLLLPATSPNDGTYDVRLVHNLVQRFVARTALSHNGGFIEKSDEKMIELNFEQESILSVGELVDGYLSEVASDQDLSLSMFVELATAVPEVARPVHDNLYYAVDAYLKEHPDINKSEKKKICSLVDVKKLSADASVHATQNDRLPLRLVVQVLFFQQLRAGPSKELALIDNGEHACTRPTQDQCDRGERRIPKHPNSLNKQVTSLSARESQQHRISEHRGGRNSFKDQLGGLLLQSRSRRIFDKLWSSKGQGEHGGKGSETSGSSQSPPLSAKPAEVKPSPLPPLRGRRYSVS

SEQ ID NO: 3496 - protein, 303 aa, Zea mays
MDTGRKRIAPGGANGAGGPKRARESETTQMGVGSKTKPCTKFFSTAGCPFGSNCHFLHNFPGGYLAVSKMTNLGGPPVPAPPGRMPMGPGGPDGPPSPALKTRLCNKYNTAEGCKWGSKCHFAHGERELGKPLQMDNSMGAPPMGPGPNGHFMPPPMPIPDMVPHSTFGASATAKISVDASLAGAIIGKSGINTKHISRVTGAKLAIRDNEADPNHKNIELEGTFDQIKHASAMVTELIVRISGKVPPQAKNNPGRGPGSHAGGPASNFKTKLCENFNKGSCTFGDRCHFAHGESELRKPAAA

SEQ ID NO: 3497 - protein, 65 aa, Zea mays
MCEEGENHSAVLLWHEGWPEQLILPPPFLAKGELPCHSQPCNSTSFLSFFFKFLESHRGKVINFI

SEQ ID NO: 3498 - protein, 402 aa, Zea mays
MGCFLGCFGGAKERRRRRKRSPSQSPNGRARAVPRVTPKKVDVDGEAAASAAAPLLATLLELRDSTDGMCLAVVKKKVTFDPNVTTFEAAPIPEDDGEGTDPEDGGASREKGWMLVPECAKSEAFPLNHRYSNCAGSDTDSDYEDAEEDEFEGDEDDEEEDEDGIDECAIDGDEDEDEHGLLGIGRSEEDACESLFLLPFGKTSKDSFGQVVAPAVPPAAEAPAVLGSVENLNLARWKEPKPRAAAALKSSDKENVTVGQENRMDDLLAEPPAAKRKEERPAVSGYTPSTPSKQEASVDASLSTWLGSSGTPESNSVRSYSPISREDRPILGDLTVEDIKISSASSTPRRSRSPSPSPDDMPILGTVGAYWNCSAKEADPVTRGGFMRTRTRFGQVNFVSAI

SEQ ID NO: 3499 - protein, 566 aa, Zea mays
MAPPPASPADSAPDPRPTASAPVPITVPSPRDHAHHHHLVDRRDTPRGRAWEPERNRRGEAMDGAAAVKLVPGEAGYVLEDVPHVSDYLPDLPTYSNPLQDNPAYSVVKQYFVNPDDTVCQKIVVHKDGPRGNHFRRAGPRQKVYFEPDEVHACIVTCGGLCPGLNTVIREIVCGLSDMYGVTKILGIQGGYRGFYARNTITLTPKSVNDIHKRGGTILGSSRGGHDTVKIVDSIQDRDINQVYVIGGDGTQRGAGVIFEEVRRRGLKVSVAGIPKTIDNDIPVIDKSFGFDTAVEEAQRAINAAHVEAVSAENGIGLVKLMGRHSGFIAHYATLASRDVDCCLIPESPFYLEGEGGLFRYIEKRLKDNGHMVIVVAEGAGQKLIAETMQSIGKDASGNELLLDVGLWLSQKINEHFKKNKMTINLKYIDPTYMIRAIPSNASDNVYCTLLAHSVVHGAMAGYTGFTIGQVNGRHCYIPFYSTLGCARGVARDDSKRPMWKQKVPSAVTGEQSRFSGTFVPPRKRKTGRQGEAGIRNGGGLPAEDIFALGAMTQLMRSYRGASIAG

SEQ ID NO: 3500 - protein, 177 aa, Zea mays
MLATQGVVAGMEGSKDEMEVEDGSLTMTAQPVEPCPMEINRAQPWRLHRVTTWGRARAGLSVVGKEMGKKTGASALGAGRRAEGQRRAVLGEPTTAQRIGGRGCSHAQGGAEDGRARTFLVAGELKKMKLGRYMESRASTSGVLGMEAKEGRSALGRQKMAAGGNHLREGAAWKDLG

SEQ ID NO: 3501 - protein, 750 aa, Zea mays
MGMGWRRALCTSVQRDDDPDRDASTKKRRPQYDAPSPRGTAAGFFSAVKSAAAGGGAASGSGSNPSTPALRCRTRPLQQPADSAPVTPPSAPAPARNHRVPLMQALSAPVSPRSPSRFALLKASLLPSKSRCGVCSRGVKSGGSSAVFTAECSHAFHFPCIAAHARSSSANGVLSCPVCASPWRQAPFLASLRLHCSFHDDKHRGGGDGRKTPPPAKLYDDDEPLLAPKAAANGGGFNPIPEADEDDEEEQGAAEFRGFFPCPRSRTTSGLAITVAPEAALVSSGRRHGKYVVAVKVKAPGLRSSAAAPRRAPIDLVTVLDVSQGMMGEKLQMLKRGMRLVVASLGPADRLSIVAFSGAAKRLLPLRRMTRTGQRSARQIVDRLVVCAAAATTATATQGQQSACMGDALRKATKVLEDRRDRNPVATVMLLSDTQQQQQQSAAPENSSRKQFGRPAVAPATRFTHVEIPIGPGDPPPLVSECEEEPPVEHAFAKCLGGLVSVVMQEVHLELAFPTGEITAVYSCGPGQQAVAISGGAGVSVRLGEMYAEEERELLVEVRAPLGSHPHSLSVRCTYRDPASQETVRGAVQPLLLPALHGERALSSSRRLHDLFVATRAVAESRRLAELQDLGTAIHLLSSARALVLQSPVTPQQHELVGSLDTELSDMRWRRGNSQHQHEEVVTPTSRSGRRRGDGDTTVTVGTPRGSAGAGEALTPTSAWRAAEQLAKVAIMRKSMNRVSDLHGFENARF

SEQ ID NO: 3502 - protein, 177 aa, Zea mays
MFNMSRDPLVVGNVVGDIVDPFITTASLRVFYNNKEMTNGSDLKPSQVMNEPRVHVGGRDMRTLYTLVMVDPDAPSPSNPTKRENLHWLVTDIPETTDASFGNEIVPYESPRPIAGIHRFAFVLFRQSVRQTTYAPGWRSNFNTRDFAAIYGLGSPVAAVYFNCQRENGCGGRRYIR

SEQ ID NO: 3503 - protein, 107 aa, Zea mays
MAAAPSLVAAAVESSDSFLPCSPHGRRLLYQCSFQRSASSSYARSVFPCRDPVELPARAHNPHHLCVHSSISLMRPLRERICLGPTSDTSAGSLMLTRVSCFSAYCT

SEQ ID NO: 3504 - protein, 189 aa, Zea mays
MDLNRGAKVLEELQQMEMRLTGVIEGQCGLLKRNIDGRCIALGKHLEQWYDHDEPVFDAWPIFDEEPVDSATALLFDGADHCFGEELDTDQARSSTIATTTTSELTSTSSPPPSSTSSSRSSAPPASRMRMRSPTTNFSLTGSCPSTRWLHHGAIERRRRLPRHRLRRLLHQLRGVIRRLLTVQQLPQT

SEQ ID NO: 3505 - protein, 166 aa, Zea mays
MAEDAPNAAAEGGQPAPPEGSADAAPSATAGAKAAEALLPSLSIWPPSQRTRDAVVRRLVQTLAAPSVLSQRYGAVPESEAERAAAAVEAEAFAAASKSAAAESPASIEEGIEVLQAYSKEVSRRLLELAKTRSAAATVPAEGSAQEAEDSSATSPAAEEAAVKEE

SEQ ID NO: 3506 - protein, 397 aa, Zea mays
MAKAAEVGNSIGRREILARLNQQLPPIGKPFLRSASYLKEALLLALTDSHQGSTHLSSPLDVTLKLGAYKSFSDLSHVLQFANFTATQALLDEIASTTSSCIHIIDFNLGVGGQWASFLQELAHRRGTGNAPLPMLKLTAFVSSASHHPLELHLTRENLTQFAVDLGIPFEFTDINLDVFDPAELIAPSPNEHFMNCFQPCMFLLDSLDAAGTNVDVASKIERFLIQPRVEDAVLGRQKAEKAMAWRAVFTSAGFAPVPLSNLAEAQADYLLKRVQVRGFHVEKCGMGLALYWQSALPPHQEIGMLSLSPTMTEVYLLLGARAYWLLHRGHAMALLGARRDGRHTHLQRGARVCRACLRAVEKRGQSGTEPSARYYIDSLPPRQRPPDFAAPTGEWH

SEQ ID NO: 3507 - protein, 310 aa, Zea mays
MYQDEQHTEEQHIEEEQHNEAEQHNEEVEHNEEVEHVTWDQAAQHHQPWDQWDHQREQQQAWDQWGQQGEPADNPMDDGSGGSSATRTRRSRKSHSVKPRHAIEREADRTLIMPHGDRNWEDLSFDGKGHHTQVNLTLGSLCRLHYPGIVKVSNGDTEDEVLVSTWDEYKFKKERNHTDRQGLVRNDFWLRYRLPDGEDYMGHAERVFQNNAKKLVKDAIYYARIQATNLYFQKHPEEAGPLNKKEGSSKIYLTEDQYREVMVPWMAPVPDAYYAWCRYWASEGFQKASAHHRQCRGTNPNHKFGGDDMI

SEQ ID NO: 3508 - protein, 292 aa, Zea mays
MASSSRSTVFSLLLLVALLLSCSGMSSAARLLEEAPPKEEHPHPAVPELPEPELPPHPTDVVPPELPKPELPPHPAVVPELPKPEVPHPVPEQPKPELTPHPAAVPELPKPEVPHPTAVPELPKPEVPHPVPELPKPEVPPHPTAVPELPKPEVPYPVPELPKPELTPHPAAVPELPKSEVPHPVPELPKPEVPPQPTAVPELPKPEVPHPVPELPKPELPPHPAVPELPKPEVPHQVAPELPKPELPPHPTVPKLPHPEVPEVPNHELPPLPKAELPPKPEGHYPEPEAKP

SEQ ID NO: 3509 - protein, 833 aa, Zea mays
MAREEDGPQFVRWREEFVSQERGSRVVHYYLEDAAGVSHLAVIGTERSLRHMLYVVSEDFNAAWGCGGSADGGGAPPVFARKWRSRREVVDWLGSFLPVKALDSKFSKYGSFADNDIGSDGYGETNGFLHQNLGKDCSSDITWSGSFWTCSKQLRHYQAFCRNGTTISTHTFVLVLSEEQNRYLAYLEDMYEDKKGQKKIKVRWFHQNQEIACAIPPPPHPCEVFITPFTQVISVECVDDIATVLTRDHYEKCSHAMSIMTGIRFCSRQYSKNKFKYFDLRTLRGYFSQAVVRSMKFPAESEKDSEYCTPGKAKFPKQLERLYSKCLGTKICRSPQADSIPSYQILSNEQPPGKHLSIKFIVPQNQLKPTYNTGDRLEILSQDSGIIGCWFRCTVLKSCTNHNRLKVQYDDLQNADDSGRLEEMVPASALALPDKLGLRHQDRLRIRPRPQENSFVDGAALLPGTAVDVWQFSGWWEGVVVSLDNIVADSLQVYFPGENFFRACQLRNIRISKDWVKNRWVDIETKSDVLSQIPSDSIQAKQTDNHALSVGVTGSSSSAMPEQEIAATQANSNGDAAVPKQELTVAQANSNGDQPVPKQELAATQANSNGDKSVPDQELAAIQANSSGDKPVPKQELAATRANSNGDKPVPDQELAAIQANSSGDKPVPEQELPATQANSNGDKPVPEQELPATQANSDGDKPVPEQELPATQANSSGDKPVPKIELAATQANSNGDKPVPEFTATQATSNGNNRQIEASKQSEVSMTDEASPLAEDDKRTILGKRPRDVSMTDEGSALVEDGKRTIIGKHPRDEGNAEQRCNGEVGVVVSKT

SEQ ID NO: 3510 - protein, 366 aa, Zea mays
MVAAAGRRRRRCAAAILLVLPVVAVLASSSAAADGSFITWDDLSTPSAAAVQGGVKAASGGGARELDTIVVAQDGTGHSRTVQGAVDMVPAGNSRRVKILVRPGVYREKVTVPITKPFVSLIGMGSGRTVITWNARASDMDRSGHQVGTFYSASVAVEADYFCASHITFENSAPAAPPGAVGQQAVALRLSGDKTMLYRCRILGTQDTLFDNIGRHFLYNCDIQGSIDFIFGNARSLYQGCTLHAVATSYGAIAASQRSSAEEDSGFSFVGCRLTGSGMLYLGRAWGRYARVVYSYCDLGGIVVPQGWSDWGDQSRTKTVLFGEYSCKGPGASTRNRVPWSRSLTYDEARPFLGPSFINGEQWLRL

SEQ ID NO: 3511 - protein, 256 aa, Zea mays
MICLKAISSPLHLPTFRRLTPTSSLRAAAAMSSSSSAVAAPIEHFVLFKARPEAVASGAAAAMVSSLQALATLVPGLAYIHAGPVLRLRSPAAEALGPTHLLHTRYATKEDLASYAAHPAHVAAVQGHVLPNALDITAVDWVNAAPLPSPVAPGSAVRLTLAKVKEGVEVAQLVEKVAAATQAAGDAKVSFGENFSPARAKGYQFGMVAVFDSVEELDAVEGDGKVEEAKALVRPLLDEVMVLDFVVGDAPTPASL

SEQ ID NO: 3512 - protein, 697 aa, Zea mays
MRRVAPAMTAASSAAGGEETAVVEKTLLNGDVYRGGSPHGKGRYVWADGCMYEGNWRRGKASGKGRFSWPSGATFEGQFRRGRIDGQGVFVGPDGATYRGAWVADRRHGLGNKTYANGDCYEGQWRRNLQDGHGRYVWANGNQYIGEWRAGVLSGRGALICANGSRYDGVWENGVPKGSGVFTWPTGGSWPGSSVDLPAMSATFFAPPGAVAVSRRSSVEGVGDKATPRICIWESEGEAGDITCDIVDALEASMPMLFKEAAAIAGGATYMRSASGVPRWASAVATTPQSKRPGRTISKRHKNYELMLQLQLGIMHSVGKSSAVPMRELEQGDFDPRENALSWTEFPPEGSKATLPHSTGYFCWKDYCPMVFRHLRKLFAVDTGDYMLSICGNDPLRELSSPGKSGSFFYLTQDDQFMIKTVKKSEVKLLLKMLNSYCKHVDRYKNSLITRFYGVHCVKRHNGQKVRFIVMGNLFCSEYQIHRRFDLKGSSYGRTADKFEDEIDETTTLKDLDLNFVFRLQKSWYTDLHEQLRRDCDFLESEGIMDYSFLIGIHFCDDISASKMGSSTFTASPKRLIKSESFQGGGTTELCFSDDAFDMVPDCSRKSLIRLGAHMPGRAEQASRRSGFVFPNQTGEVHDVILFFGIIDILQDYSVKKRLEHSYKSLQTDPNSISAVEPKLYSRRFQEFIGRIFVEDG

SEQ ID NO: 3513 - protein, 263 aa, Zea mays
MATAGAFHAGGFLLLPVRRSLRGPSPSPWSHFRTHFISSKPPPSTPLPPPVPPARLSPVGSAFGPPSRKTGAVGAGAGAGVVGWYLGLLDARPVLTKSVTAAVIFTAADVSSQMLTLGPEDSLDFLRTMRMASYGFLISGPSLHLWFNFISKLFPKKDVVNTLKKMFIGQAVYGPIINSVFFSYNAGLQGETVAEIIARLKRDLVPTIKSGLLYWPTCDFITFKFVPVHLQPLVSNSFSFLWTIYITYMASLKKADVEVAPST

SEQ ID NO: 3514 - protein, 149 aa, Zea mays
MQQPEEGGTGTTGTVAVGGADHGRSPGLTLLASCQQPNTRTAEAVARAGAAPQSEMGSGHEPARRGAGLAPGCLSACCGLLLRSASRHPWGGSLAADGEVTSELEGWFVLPCGYCGWDRPRMTWTAAVTICRVGGRAVARKPRPRVKKW

SEQ ID NO: 3515 - protein, 405 aa, Zea mays
MAAEMVKAATSDKLKEMDWAKNIEICELVAQDPGKAKDVIKSVKKCIGSRSKTTQLFAVMLLEMLLNNCGEPVHRQVIDNGLLPILVKIVKKKTDLPVREKIFLLLDATQTSLGGAKARFPQYYEAYYELVSAGVQFSNRPNVLVTRAEVPVPETRTEPNNESLSTRLTEAQQEVHTQPVPDASIVQKASSVMEVLRDVLNSMDPRHPEGATDEFVLDLVEQCTFQKQRIMHLVMTSRDETLVSQAIELNEELHKVLVRHDALLSVHPTTAVASNIKEEEEEEDAESLYRRLRKGKALSQDYTDDLVPSFRSMPEDKLRRPLTIQSPHPDKRLGALNIRSPDREEPRLDPAPLIPPPPAKHAERERFFREKSIDGVASLPGHMRGLSQHSRDGSSSCSGSTDYGD

SEQ ID NO: 3516 - protein, 209 aa, Zea mays
MASSLARLGAALPRARPRAATRTLPPPRWDAAALGASRRAAPNVCRCLVHSDVKVAPTSDFKDSSKSETWRIKMLYDGDCPLCMREVNMLRERNKSYGAIKFVDISSKDYSPDDNQGLDYETSMGRIHAVLSDGTVVTDVEAFRKLYEEVGLGWVYAVTKYEPVASMANAVYGLWAKYRMQITGRPPLEEIMASRRAAGECKDDKVCKM

SEQ ID NO: 3517 - protein, 545 aa, Zea mays
MEATALASHSSPFAVHRSTGKPAFAYPHRGGPSMVSSVHLRTSRTPARSAAWRRRRRGTGLVVRAEMFGQLTTGLESAWNKLRGVGVLTKENIAEPMRDIRRALLEADVSLPVVRRFVSSVSDKALGANAIRGVRPDQQLVKIVHDELVQLMGGEVSDIVFAKSGPTVILLAGLQGVGKTTVCAKLAFYLKKLGKSCMLVAADIYRPAAIDQLTILGKQVGVPVYSEGTEAKPTQITKNAMEEAKSKNIDAIVVDTAGRLQIDRSMMDELKEVKKAVNPTEVLLVVDAMTGQEAAALVTTFNIEIGITGAILTKLDGDSRGGAALSVKEVSGRPIKFVGRGERLEDLELFYPDRMAQRVLGMGDVLSFVEKTQEVMRQEEAIELQKKIMSAKFDFNDFLKQSQNVAKMGSMSRIIGMMPGMNKITPAQIREAEKRLAFVESMINAMTAEEREKPELLAESRERRIRVAEESGKTEQEVSQLVAQLFQMRAQMQKLMGMVQGQEAIAGMGDLMDSLKSEEKAPPGTARRKRRNNTSKQRDLDAVLS

SEQ ID NO: 3518 - protein, 612 aa, Zea mays
MAAVKASEARGDPPLLQVVELSRIVAVEGAGTLSSADLARILVSNLCFAHNSPSLWKLLGQAVVSRLLCPLHVLALLTPRVLPQRRAQPEAYRLYLELLKCHVTSSLLSMEAGPNRDKIGKSIAEALQLSKVYGFSGTEFGHVVIMFVLAVVSKLIDSIFEDCGFPSAMVEGQESVNAIDGPQPMDLDVKMGSTENQNEHREQLRRKNTLIALDVLHMMTADRKIQSFLRLIFLNMPERFSSLRQRLSSIEAQKVSLETLLPSGHKINELLINFWRVCKTDYQPNNKHILGVLGNMGSGGSLLGQLTGAGRPACWIIFDIYVENAIDGRHLSVISAIRIIKEMTKTMQVLNEASWQETFKALWISALRLVQRAREPLEGPIPHLDARLCMLLALIPLSVAAILQEESDMLGAEGNKILPQRQGLISSLQDLIQYSGLLVPPSSVVNAANAAASKAAIFKANYEAGVGNSSMMDQTDSSMKAAGNMLHLIIEACISRKLIDTSAYLWPGYVVPSGTLKDTALPQESPWLNFMKGSRLSGPLIDALVASPASRVREMTFHSWDTTHPQIHSVPISTHAYLAGSGATVAAVVCAAVAGQWRWSDCGCGHGVDWIG

SEQ ID NO: 3519 - protein, 324 aa, Zea mays
MLGLRRLPAVSGRLAPEVTSVSAASSHSAVFFRTLQILVQQGPVRLQKLSAPDTGIVELRLERPEAKNAIGKEMLQGLRSAIQEVEADTAANVVLVTSSVPKVFCAGADLKERRLMGPSEVRDFVNSLRSTFSSFEVCCKITIYSSVSVQLLSDFWKFRKSMVMKSETLDKAIQTNVHFVCILNCILTDKCCINSPIDVNFCIMFKQALSIPTIAVVEGVAFGGGLELALSCDLRICGKDAKFSLPETGLAIIPGAGGTQRLPRIVGRSRAKELIFTGRRFDAVEAVTMGQFNVLRSASCCYDFFLKGNFYRFFEGSCMLTLQE

SEQ ID NO: 3520 - protein, 169 aa, Zea mays
MAMAAGRGLLALFSVVVVAGLTSAANGPFLSDSVFQPSAGSTGRSLLQAKNSCPVNFEFQNYTIITSKCKGPKFPAGPCCAALKEFACPYYTYLNDESNDCASTMFSYINLYGKYPPGLFSSECKEGKQGLSCADVLERDSATASSGHHAQISLLALITVLSVVVALFH

SEQ ID NO: 3521 - protein, 300 aa, Zea mays
MQEFQSIPGLAGRLFGGAAAPGDLRRAQAAQHGPGGARCGGASPAAPEAVKCPRCESTNTKFCYYNNYNLSQPRHFCKSCRRYWTKGGVLRNVPVGGGCRKAKRASPSASASASSPASSSAPSTPASADAAKNPRRASASPRSNSGSASPTAAAATTPTPTDPSTSATPSSNGVAFTGSHHSSNPFSTIDVAAAPPAPIFADQAAALASLFAPPPPPPLPVFSFAAAQPKEEEAPTNSELQQHLAAQAAPSSSVSEDIMAPFASLDAAGIFELGDAASAAAYWSAGSCWADVQDPSLYLP

SEQ ID NO: 3522 - protein, 767 aa, Zea mays
MASNTLRFLQAIAPIVLLARLAQASAQPQRQPSQLLPPGVARPGCRDRCGNITIPYPFGIGAGCYREEYGFELLCDDARSPPRLTISGGYQLASLSLSAGEVRIYLNATRKCYNVTTGAFVDRNDDASLALGSASPYRVSPTKTRLVATGCPTIGYFVDGAGYFVSGCTSVCRPAQYAVEGQGPCTGVGCCQSAIPSDIYYYEPNTLSLQLQAGKLDPILGANVTTCQYVFLADADWFSYTDSVFFNRTDDFAAPVVFDWAVRNVGNCSAAKLNMTDYACRSRDSECVPSSNGAGYRCNCSQGYEGNPYLDGGCRDIDECLRPDEYQCYGNCTNLPGHYICKCRPGTDGDPRQRNGCRPKDKFTPALKVVTGVSVGVFLSVFMCFWLYLGLQKRKLIRTKQRFFEQNGGVILQQQMRSYTSAGAGPGGFKIFSEEELEKATNSFAADRVLGRGGHGVVYRGVLEDKTVVAIKRSKMMEEAETKEFAREMLILSQINHRNVVKLLGCCLEVQVPMLVYEFVSNGTLYHYIHDKDRKTDITLDTRLRIAAESAEALAYMHSSASPPILHGDVKTANVLLDDKLTAKVSDFGASKLAPADEAEIATLVQGTCGYLDPEYLMTCQLTDKSDVYSFGVVLLELLTGKKALYFDGPEEDRSLVSCFMTATKAGRHKELLDSQVRNEMRAEVLEEIAHLVMRCLSMSGEERPTMKEAAERLERLRRYQQHPWAQDGNLEERQTLLPMEQRDLPSMFRQQDILDLEEGSAYTYSL

SEQ ID NO: 3523 - protein, 596 aa, Zea mays
MATAAASTTTSAAVLAFRLLRRLPRRLSVSRAPPAALASSSSSSSRRLPSLARHPLGHRTRMGHTAAAAAAAAEPALGLTKPNAVEPPQVTFSAKDIEFSEWKGDILAVAVTEKDLSKDADSKFENAVLKKLDGQLGGLLSEAAAEEDFTGKTGQSVVLRLAGQGFKRVGLIGLGQSAPSTAAASRGLGESVASVAKAAQASSAAIVLASPSGIQEEFKLTAAAAVASGTVLGLYEDSRYKSESKKVHLKQVDIIGLGSGAEVDQKLKYANDLSSGVIFGRELVNSPANVLTPAVLAEEASKIASTYSDVFTATVLDVEKCKELKMGSYLGVAAASANPPHFIHLCYKPTDGNVKRKLAIVGKGLTFDSGGYNIKTGPGCSIELMKFDMGGSAAVFGAAKALGQIKPPGVEVHFIVAACENMISGTGMRPGDIVTASNGKTIEVNNTDAEGRLTLADALVYACNQGVEKIIDLATLTGACVVALGPSIAGIFTPSDELAKEVAAASEVSGEKFWRLPLEESYWESMKSGVADMVNTGGRQGGSITAALFLKQFVDDKVQWMHIDMAGPVWSDKKRAATGFGVSTLVEWVLNNSSSS

SEQ ID NO: 3524 - protein, 89 aa, Zea mays
MLQQAAVGDPAAPLAQGDAADSDVLEGGRHRAAVCPSGSCRVIEVPEVACCLQPVINIIPLQLLAYNLTVLQGFDVDQPRNLEKSVTTQ

SEQ ID NO: 3525 - protein, 271 aa, Zea mays
MASSKWWEQAALDFPPPQQHHHQQPQPQQQPHQAVPMPPALATAPAGAVGASPEGKQQGQQQAGAIVPLRRPRGRPLGSKNKPKPPVIITRDSPDALHSHVLEVSPGADVCACVAEYARRRGRGVCVLGASGAVGDVAVRGAAAPLRGRFELLSVTGTVLPPPAPPEASGLAVLVSAGQGQVLGGSVVGPLVAAGPVTIFAATFANAVYERLPLADAPELEVKPDLSTATSAGGQDVQPQLPMAPSHQQPPDMGAGYAGHRSPPYPWGGDV

SEQ ID NO: 3526 - protein, 400 aa, Zea mays
MESGGGTAVGAVGSLLTSSCFRDTAVGVAQAALSFCQAEVDSGSPSDVEILENPTDSKKRKLVHVLDDNEVVYEDEEGPITQADLQKWFVDDWDKRTPVKVSNDGCTNDFLMVGLSTKDMPVTKADSIDVLCDYIMAIEDDTTLEMTWVRSFNPFKIEISVKDLQNILTINKDMTLRCFDMAVRLLANKESCRPKGEIINNRKHYMDMRFWRMVGFGKLPKYHQDPTAKELAKTLDCWPSMNYYITGCRYVLMPWKFNGCHALFVIDHVKKHVTFIDFTPTQDWCKHIPYKRFAEAIIMASKKYKIAYNKKRSGWAEDIFKWEHTIQTGVPIDLRGFNTSYLVLQAMAMWGNDRRMKFVGDAKIVRRSFVIDLLSYEDNSCRYAIPANIQQRLIDIAKKD

SEQ ID NO: 3527 - protein, 189 aa, Zea mays
MVTMVHHRRAPSAHRAGSCPRKGARHYTGCGPRRHDSSRSGKGSRHSADSRPRRRVSNRRAGSRPSQGQGVALVAGHATAPAAAQGRRITASVQDEPVGAQGMEDNGVQLGDDNELPAWFHGAAGAALGEDWMFEDGNYGASPASTIGQTPAPSARRRGGRAPQAPAIVTRSYARSVSPNVNLDLADAR

SEQ ID NO: 3528 - protein, 327 aa, Zea mays
MATKAGSSLSPCIRLVEESLLLPTQDAGLFAKAFVLIFAHTFLFIAVAVHFAHPLATDILADIKAQRSSSRTTTTTGAASSNHSKELALLAIYLCYLASKLATQLVTALATATTYSGERLTRKVVMERIAGGGGLLGTAAVAGVLELSFTALLAALLVSTWTYADDSIVKSVCGYSMFSVALLVYIYLATVIPVSVGVSAVDRGCHGVWALRRAWRLLRARGKEAAVLVFVVNILPAFIYPAPVYAFSYMYPADEYSLYYGQDMAVRFSLHGPAMWRQWSQGVCWFMGVVFGSGLPSVGAQLFSMVAATVFCCLSIETNDDAARAVV

SEQ ID NO: 3529 - protein, 147 aa, Zea mays
MTLAALFRRTKSQGTVALIFGILRPLLRRVRGTHKQVTKLQCPSRARTDSDHDASEIFDLTSLISSHTCRMVPIKGSESITHLPKSWCPHEVARGSREWIGRHGDRSWHRSAAAQPRSNQVIVVKFKIPTGQASLTYVDHGTSFPWA

SEQ ID NO: 3530 - protein, 533 aa, Zea mays
MEKESKQGFFSALKGEVVRGLSPGRSRGKSLLLPRSRKTAAAEEVAPPEKLAQYAPDPLVTHSGSLRLAGEVLAPLMEGPDVAEDDTFAEDSGRRDGFGQWVRGHLTRAPLIAGGGDGSFRRSDLRLLLGVMGAPLAPVSVSTAEPLPLAPVKGAPIVRTRLGFFSPGSPLFSRLALANAAAFWALTPPAALDLVFMALQESSSAQYILQQYLAASGGAKVLRSARNAYAMGKVRMVASEFETATRVVKNRGAAAAAAVEQGGFVLWRMSPDMWYVELAVGGSKVRAGCNGRLVWRHTPWLGAHAAKGPVRPLRRALQGLDPLSTAGLFAEARCVGEKKVGDEECFILKLSADAETLRQRSEGPAEIIRHVVFGYFSQRTGLLVQVEDSHLTRIQPHAGGDAVYWETTISSFLEDYRAVDGVAIAHAGRSAVTLFRFGETAMSHTKTRMEEAWTIQEAAFDVPGLSTDCFIPPADVRRDSDSVGEPCELPPRGAKAGAVHPACDAVHSRRRRDVAPADGELATRSTGRWRCDF

SEQ ID NO: 3531 - protein, 597 aa, Zea mays
MASSASLQRFLLPSSHAAATAASPSSRLRRTGRARAAVSVPPPAAAGEQVPTERLEPRVEERAGGYWVLKEKYRAGLNPQEKVKLEKEPMALFMEGGIQDLARVPMEQIDAAKLTKDDVDVRLKWLGLFHRRKHQYGRFMMRLKLPNGVTTSEQTRYLASVIEAYGADGCADVTTRQNWQIRGVTLPDVPAILDGLRAVGLTSLQSGMDNVRNPVGNPLAGVDPHEIVDTRPYTNLLSSYVTNNSQGNPTITNLPRKWNVCVIGSHDLYEHPHINDLAYMPAVKDGEFGFNLLVGGFISPKRWAEALPLDAWVAGDDVVPVCKAILEAYRDLGSRGNRQKTRMMWLIDELGMEVFRSEVEKRMPNGVLERAAPEDLVDKRWERRDYLGVHPQKQEGLSYVGLHVPVGRLQAADMFELARLADEYGTGELRLTVEQNIVLPNVSNERLDALLAEPLLQEQRLSPRPSMLLRGLVACTGNQFCGQAIIETKARALQVAREVEKRVAVPRPVRMHWTGCPNSCGQVQVADIGFMGCLTKDSDGKIVEAADIFVGGRVGSDSHLADVYRKSVPCKDLVPIVADLLVERFGAVPREREEDEE

SEQ ID NO: 3532 - protein, 203 aa, Zea mays
MNPEYDYLFKLLLIGDSGVGKSCLLLRFADDSYLDSYISTIGVDFKIRTVEQDGKTIKLQIWDTAGQERFRTITSSYYRGAHGIIIVYDVTDQESFNNVKQWLNEIDRYASDNVNKLLVGNKSDLTANKVVATETAKAFADEMGIPFMETSAKNATNVEQAFMAMAASIKDRMASQPAAANARPATVQIRGQPVNQKTSCCSS

SEQ ID NO: 3533 - protein, 1495 aa, Zea mays
MGRKKRTSTPNPTSPPSYAPRRPAGAKVAGNGGEDDGVRAEVEKALACLQRGNHARAVRLMRDAIAHHGEASTPLLLRAHGTVLARAASVLDDPAARARRHRAALQAAQRAVELAPDSIELSHFHAMLLFDAATDTRAYEEVVAECERGLSIEAPSDPAPHSLRLPGPDVDQVQSELRNLIQKANLASVSTWFKTLRSAGDDKFRLIPVHRFADEPMEARLVPSAPSPRRSNEIKKATKTSEERRQEIEVRLAAMRLLQQQKEQSNGVVSATPASSQSQGDEAPSSSLSLVGGHRADRRKGGSRKATGLSASERTDQARAYWGSIPVDQRLAFLNTSISELKSHYASAIHKEKDVASAASDVLNEVIRFANKHGNWEFMVCGRCRGQFTDVEAHRWHVMGEHVGLLSSELQEMVPQEIDADWVEMLIGWNWSPLDATAALKLFEEDQTDNLGTDRGKESDPTDNWSNKDNPDMSESSASPHNGECNGFGVVVREGDGTWPLSDDDERAKILERIHSLFKILVKNHNLSVCNLNRVIRFAVEELRGLSSGSLLLNHSLDKSPLCICFLEASSLWKVAKFLQDLVQASGINRNLENDGLGDRDSSPQNHNVLEKVILSSDSSELIIDGQTFGGKFDSESVDTDTLFSWLYAGSSIGEQLLAWNRMIDERSNQCMDLIRALGREFNNLQNSCERKLEQLRNEEAFISVEDLLCEEQTRREQVEQYGFQSFEEILRKRQAELLERNTEVQSDSNRSEIDAISAVLKKLHTSHFGYDDAFSGMAPRLFDLDGVEDEWRLHDFIHPNDSMVHTVISKMKEKVTVEISKIDAQIMRNLSVMRHLEHKLGPASALDYRMILLPLMRSFLQSHLGELVDKDAKERSDAAREAFLAELSLDAKKNASKGADMKQSHEKSKDKKKFKDSRKSKELKDSSWSNQSLIHQDSTDEGTSETSQMLADCDDLCCKCSTSEDYFNEQEEELRHRVQLEAEERKLEEALEYQRWIEEEAKQKHLAEQCRSTHASSVIGIKFGDFSYTENENNFSQKLNGIEFDSSDAHALTSSDMSVSMLTLKMNGVCNNAQPIKPLGNFGTQNPKRSSSEPQRYSQGHSAGIEKPNFEKVGSGAIPSTDVCIEDDFDKRFQEDLDEAVRQSLGCDAYPAGTVSTSNGTEVYGTGLKNAAGEYNCFLNVIIQSLWHIRRFRDEFLKTSLLHKHVEDPCAVCALYGIFIDLSKASKGQREAVAPTSLRIALSKSYPNSKFFQEGQMNDASEVLGVIFECLHKSYTSRTVYHGVSHEKNSIGSWDCANISCITHNLFGMDVYERMNCHNCKMESRQLKYTSFFHNINASSLRTAKMMCPDSSFDELLKVVIMNDQLACDQDVGGCGTPNHIDHILSNSPHVFTVVLGWQNNKERVDDISATLAGISTEIDISIFYRGLDQGGKHTLGSVVCYYGQHYHCFAFKDGRWVMYDDQTVKVIGSWGDVLVMCEKGHLQPQVLFFEAAN

SEQ ID NO: 3534 - protein, 342 aa, Zea mays
MYPLPSSLSFSLVRVEDSKSNSKHATRKSRTHDKRKKNPRNISAALLVPSRAGEMAGMSRAIRNFAAASRRTLTAASGPALPKEAAAAGARVRAAAPGRMGRDQEDGRRVQWVFLGCPGVGKGTYASRLSQLLGVPHIATGDLVRDALATPGPFSNKLAEIVNHGKLVSDEIIINLLSRRLEEGEEKGELGFILDGFPRTIGQAEILEGVTDIDLVINLKLREEALLAKCLGRRMCSQCGGNFNVASIDIEGEDGGPRMYMPPLLPPPQCESKLIARADDTEEVVKERLRVYHDLTEPVEEFYRARGKLLEFNLPGGIPESWPKLLQALNIEDPDNKRSAAA

SEQ ID NO: 3535 - protein, 257 aa, Zea mays
MATAPYASSLFLASSPISTAPRIRAGPCPPSAQPSLRLRPRPSPAAAAAVQAEHQPALTAAPKPPALPFRVGHGFDLHRLEPDLPLIIGGINIPHDRGCEAHSDGTRSCGRHCPLWFLRGPVSDLAFGNFVSSPRAGDVLLHCVVDAILGALGLPDIGQIFPDSDPRWKGADSSVFMREAVKLMHEAGYELGNLDATLILQKPKISPFKETIRSNLCDLLGADPSVVNLKAKTHEKVDSLGENRSIAAHTVVLLMRK

SEQ ID NO: 3536 - protein, 684 aa, Zea mays
MDAYEATKVVFSRIQALDPDHAAKIMGLLLIQDHGEKEMIRLAFGPESLLHAVMAKARKDLGLLLPASPTSVAAAGHAPFLQLPRQNSGRAGAPSPLSVSSPSSWGHAPAFSRSNSTSNGTGTAEEAAGAGEELPSPVNGGAAPFFPHQSGDALLDDLQLQEQLAFLNEGSANPAHQLPGFVGGECRSPGPGDASGMFAFGLGWPNGGPAHRRSSSVNEFCLGGGGGGDGFGWKPCLYYARGFCKNGGSCRFVHGGLSDDAAAFAGAKMEAAADQQQQQQCQDFLIRSKSQRLGSAAFPYSSTGSLPGSPSAASKCLSFLLQQQQQQHDRAAAAASLMLGGGDEAHKFMGRPRLDRADFANMMNPGSRQIYLTFPADSTFREEDVSNYFSIYGPVHDVRIPYQQKRMFGFVTFVYPETVKLILAKGNPHFICDARVLVKPYKEKGKVPDKCRKPQQGDFSGCTTPTGGLDGGYPFDLHQLGGRMLQHSSSANELLLRRKLEEQQQAIELQSRRLMGLQLLDLKARAAAAAASPLPTPIGDAFASSQPVSTTAVESPSPPESGQQLLKLRSGFALEGKVNGGDKEESAREASPDAADSDQSGGEHNLPDSPFASPTKSAALLHDSFTATETESTAASRVGVDAGVGSKIDGGSNHLRPPALEIPSPSSYFFPMHRLSSDHGAMGM

SEQ ID NO: 3537 - protein, 459 aa, Zea mays
MAPANVRAAQAQAPSADRRLSTLVGHLLPSSPRRAAADTSATSTLESFPTMASQGSSVFAALEQAPEDPILGVTVAYNKDPSPVKVNLGVGAYRTEEGKPLVLNVVRRAEQMLINNPSRVKEYLPITGLAEFNKLSAKLIFGADSPAIQENRVATVQCLSGTGSLRVGGEFLARHYHERTIYIPQPTWGNHPKVFTLSGLNVRSYRYYDPATCSLHFEGLLEDLGSAPSGSIVLLHACAHNPTGVDPTIEQWEQIRQLMRSKSLLPFFDSAYQGFASGSLDKDAQSVRMFVADGGELLMAQSYAKNMGLYGERVGALSIVCKSADVAVRVESQLKLVIRPMYSNPPLHGASIVATILRDSEMFNEWTLELKAMADRIINMRQQLFNALKSRGTPGDWSHIIKQIGMFTFTGLNSEQVAFMRQEYHIYMTSDGRISMAGLSMRTVPHLADAIHAAVTQLK

SEQ ID NO: 3538 - protein, 555 aa, Zea mays
MPPVKAEDLVVHAVKEQFAGLDYCITSPPPWITTVLVGFQHYLVMLGTTVLIATIIVPLMGGGHAEKAIVIQTILFLSGINTLLQVHFGTRLPAVMSGSYTYIYPAVAIILSPRYALLIDPLERFVFTMRSLQGALIIAGVFQAVVGFFGIWRVFIRFLSPLAAVPFVTLTGLGLFFFAFPGVTKCIEVGLPALVLLVIFAEYASHVFAKGSFVFSRCAVLVTVVIIWIYAEILTAAGAYNERGPVTQFSCRADRSGIIQGSPWVRFPYPFQWGYPIFCFQDCFAMLAASFASLIESTGTLIAVSRYSGATFCPPSVFSRGIGWEGISIILDGMCGTLTGTAASVENAGLLAVTRVGSRRVIKISALFMIFFSLFAKFGAVLASIPLPIFAALYCVLFAYSAGAGFSLLQYCNLNSLRTKFILSISLFLGLSIPQYFRVYEMFFGFGPVHTHSVAVRELDAVDEINSIKLSHPHLSSSYLPLQFNVMVNVIFSSPATVAAILAYLLDCTHLYWEASVKKDRGWFWWEKFKSYKYDGRSEEFYRLPYGLSRYFPSL

SEQ ID NO: 3539 - protein, 286 aa, Zea mays
MRQGMSSPSAAAALVLLLALLAGGQCREAQLDAADAGTGTENYTASDAAVYWGPWQRARATWYGQPNGAGPDDNGGACGFKHTNQYPFMSMGSCGNQPLFKDGKGCGSCYKIRCRKDPSCSGRTETVIITDMNYYPVSKYHFDLSGTAFGRLAKPGLNDKLRHSGIIDIEFTRVPCEFPGLKIGFHVEEYSNPVYFAVLVEYEDGDGDVVQVDLMESKTARGPPTGRWTPMRESWGSVWRMDTNHRMQPPFSIRIRNESGKTLVANNVIPANWRPNTFYRSFVQYS

SEQ ID NO: 3540 - protein, 480 aa, Zea mays
MPASRIPFKRCTAAVPGVGKPGPAASMPPAKRRRDRVVPSRSRDSMPPPAPHVEEGDNRHGEVYNVELLMAEPKVDSFGPVETALWTQARTAPTDADLYRACRNINKRGSCGGAASGSVLTSVSNAASDACAGGNGTIVRVSNAALEGGAGSNGGLEGRPAVVECKPKREGSDKKEDFYWPEDFVLGDVVWARSGKKSPMWPALVIDPLQHAPEVVLNSCVPGALCVMFFGYSANGHGRDYGWVKQGMIFPFVDYLDRFQGQPLYKLRPTKFRAAIEEAFLAERGFFDLDMDGACSPRKFVDKQSDPNGFQEEAASNNEQECQSESQVVGKSALCCDSCGNRLPSKVSKKRKQGGEQVLCRHCEKLLQSKQYCGICKKIWHHTDGGNWVCCDECQIWVHVECDLTCNNMEDLENADYFCPDCKSKCKTVPATEKMNTSHSSECASTSKGKSTPMIAVFCNGEEALYVPEKHITLPFMRAG

SEQ ID NO: 3541 - protein, 171 aa, Zea mays
MANNLLRPLALLLAVLGCALCPRADATAFEVGGDDGWVVPPASDGGRYNQWASKNRFLVGDVVHFKYSEDSVLVVTEADYDSCRASHPVFFSNNGDTEVTLDRPGPVYFISGETGHCERGQRMVVRVAGQGAPPPAPPSPPAPTGGSAAPGTTSGAIAALAMALLAIAIGV

SEQ ID NO: 3542 - protein, 296 aa, Zea mays
MAQEDVHLDDAGLALGLSLGGGGGGGASAAARHGTSRSRLSTEAPRTLEPPSLTLSMPDEATATATGGSGGSGGAARSVSSRSVEGVKRERVDDAEGERASSTAAAARAGAGAEDDDDGSTRKKLRLTKEQSKLLEDRFKDHSTLNPKQKIALAKQLKLRPRQVEVWFQNRRARTKLKQTEVDCELLKRCCESLSEENRRLQRELQELRALKQLAGPHPHQAPSSSPAAATQGVPVPVPVPPPLYVQMQMQLPMPAATLSLCPSCERLRGGPKAEPDRPQAATHRFFNPFTHSAAC

SEQ ID NO: 3543 - protein, 403 aa, Zea mays
MYVVKDIGGAIGLMAVALVLLGTWPVVLAVLERRGRLPQHTFLDFSATNFMAAVLIALTFGQIGPASSTPNFLTQLTQFKNNWASVLFAMAGGVTLSLGTLATQYGWAFVGLSVTEVMASSLKVVIGTTVNYFLDGRMNKAEILFPGVGCFLIAAILGSLVHASNAADNQEKLANNNASNAAAAADEEKDLTKHLLELEIPSQEAEPDAGTAGFLVGLEEKRSIKVLGSHTLLGLGIVVFAGIFYALFAPAFNLATNDQWHTLPAGVPHLAVYTAYFYFSLACLAVSAALNVWLLYRPMVGVPSSTLAAYVLDGDGRGLAMLAGMLCGLGNALTFMAGQAAGYAAADSVQALPLVSTFWAVALFGEYRRSSRRTYTLLASMLLMFTVAMVLLMASSGSRSIIH

SEQ ID NO: 3544 - protein, 294 aa, Zea mays
MLLNPACEAAAPMDSIRHHLLDEPAAAATASAAPRPVYCRSTSFGSLVADQWSESLPFRPDDADDMVVFGALRDAFSQGWLPDGSFAAVKPEPLAFPDSPYERGSYPCLGGFLLAEGPETPTEAATTPGSEEEAAAAVSRGKHYRGVRQRPWGKFAAEIRDPAKNGARVWLGTYDSAEDAAVAYDRAAYRMRGSRALLNFPLRIGSEIAAAAAAVAATAPAAGDKRASPEPTASSDSSPSASSATPKRRKRGEAAAATMAMALVPPPPAAQAPVQLTLPARPWFAAGPVQQLVS

SEQ ID NO: 3545 - protein, 989 aa, Zea mays
MPPLTSSLLSRSTTGGSSARGVAVAAAISRPAADAAPSSSSPPARPTPRPRPSPASPFASGLAGRLFGGHRAATRSASSAAAVFERRFASAATRNSYDEILTGLGRPGGGEEFGKYYSLPALSDPRIDRLPYSIRILLESAIRNCDDFQVTGKDVEKILDWERSAPKQVEIPFKPARVLLQDFTGVPAVVDLACMRDAMSKLGSDPNKINPLVPVDLVIDHSVQVDVARSANAAQANMELEFYRNKERFGFLKWGSSAFRNMLVVPPGSGIVHQVNLEYLARVVFNNGGILYPDSVVGTDSHTTMIDGLGVAGWGVGGIEAEAAMLGQPMSMVLPGVVGFKLSGKLRNGVTATDLVLTVTQMLRKHGVVGKFVEFYGQGMSELSLADRATIANMSPEYGATMGFFPVDGKTLDYLKLTGRSDDTVAMVESYLRANKMFVDHSQAEAERVYSSYLELNLEEVEPCLSGPKRPHDRVTLKNMKSDWLSCLDSDVGFKGFAVPKESQGKVAEFLFHGTPAKIKHGDVVIAAITSCTNTSNPNVMLGAALVAKKACELGLEVKPWIKTSLAPGSGVVKQYLDKSGLQKYLDQLGFNIVGYGCTTCIGNSGELDESVSAAITENDIVSAAVLSGNRNFEGRVHPLTRANYLASPPLVVAYALAGTVNIDFEKEPIGISKDGKEVYFRDVWPSTEEIAEVVKSSVLPDMFKSTYESITQGNPMWNELPVSTSTLYPWDPSSTYIHEPPYFKDMTMTPPGPRPVKDAYCLLNFGDSITTDHISPAGNIHPDSAAATYLKERGVERKDFNSYGSRRGNDEIMARGTFANIRLVNKFLKGEVGPKTIHVPSGDKLSVFDAAMKYKNEGHDTIILAGAEYGSGSSRDWAAKGPMLQGVKAVIAKSFERIHRSNLAGMGIIPLCFKAGEDADTLGLTGHERYTVHLPTNVSEIKPGQDVTVTTDNGKSFTCTLRFDTEVELAYYDHGGILPYVIRKIAEQ

SEQ ID NO: 3546 - protein, 501 aa, Zea mays
MEMPFLVNQMMDLADPQQQQRLIAGAALLLATAAFLRLLLGSRSGGGKRLPPTIPGAPVVGGLVKFMRGPIPMIREQYARLGSVFTVPIITRRITFLVGPEVSAHFFKGNEAEMSQQEVYRFNVPTFGPGVVFDVDYSVRQEQFRFFTEALRANKLRSYVDQMVAEAEEYFSKWGESGTVDLKYELEHLIILTASRCLLGREVREKLFDDVSALFHDLDNGMQPISVLFPYLPIPAHKRRDRARARLAEIFATIIKSRKASGQSEEDMLQCFIDSKYKNGRSTSEGEVTGLLIAALFAGQHTSSITSTWTGAYMLRFKQYFAEAVEEQKDVMKRHGDKIDHDILAEMDVLYRCIKEALRLHPPLIMLLRQSHSDFTVTTKEGKVYDIPKGHIVATSPSFANRLPHIYKNPDSYDPDRFGPGREEDKAAGAFSYISFGGGRHGCLGEPFAYLQIKAIWTHLLRNFEFELVSPFPENDWNAMVVGIKGEVMVNYKRRKLVVDN

SEQ ID NO: 3547 - protein, 278 aa, Zea mays
MAEMTVTVAAAKSTLRTCPGARRAAVLGRWMPLAPAAPANLKLFSPAVRVPRATSPAAVEQDGSNTDIVPIPKVIIDQDSDPDATIVEITLGDRLGDLLDTMSALKNLGLNVVKASVCLDSTGKHIKFAITRAFTGRKIDDPELLEAVRLTIINNMIQYHPESSSQLAMGATFGPEAPTEEVDVDIATHIDIYDDGPERSLLVVETADRPGLLVDLVKIISDISINVQSGEFDTEGLLAKAKFHVSYRGRTLTEALQQVLCNSLRYFLRRPTTEDASF

SEQ ID NO: 3548 - protein, 482 aa, Zea mays
MGSFGMDMDWNQKASVLLWDWENLPPAAANGSESHRTTAAAPQFAGLEATGHEPAPSSVSSSIHSLPSAKGNKNKNNMELISFAPAKAPDKDTGSVLSSGEPVVLGLKLGKRTYFEDGCGLGQSGKSSAALGTASAATPPGPAKKAKAAAAAPTAQQQKSYCQVEGCRTDLSSAKDYHRKHRVCEPHSKAPKVVVAGLERRFCQQCSRFHGLAEFDQKKKSCRRRLNDHNARRRKPQPEALPFGSSRLSAMFYDTRRQASLLFGEGPYGQMRSCASSWWDSPGAGGGGFKFAETRGAPWLKPARAAADGLLPLSGQQQQQVWNDSIPHVAHQEDFDGFTVTAFKGISPKTLDHQGAGVEACAAVSSPDGAPDLQRALSLLSNSPAGGGGTNTNHPPPPPAAELHHHRAAPSSCLAAGSVSVLQEASSPGLWQDGGGSAALGHHAHARLQALDAAMATAQELLQLPRPPPSYGGSSSHYDLMR

SEQ ID NO: 3549 - protein, 388 aa, Zea mays
MVSLRCTTAHHSLLGSPTCLARPRRRACPVVRAAVAVEAGAQAKVSLIRIGTRGSPLALAQAHETREKLKATHSELAEERAIEIVIIKTTGDMILDKPLADIGGKGLFTKEIDDALLQGRIDIAVHSMKDVPTYLPEGTILPCNLPREDVRDAFICLTANSLAELPAGSVIGSASLRRQSQILYRYPSLKVVNFRGNVQTRLRKLKEGDVSATLLALAGLRRLNMAENATAVLSVEEMLPAVAQGAIGIACRSNDDKMMEYLSALNHEDTRLAVACEREFLAVLDGNCRTPIAAYAYRDNDGNCSFRGLLSSPDGSKGILDFRLKRAYSDFVVSIIERQHLVTFMVLLTVFETTRSGPYSFDDMVEMGKDAGHELKAKAGPGFFDSLQ

SEQ ID NO: 3550 - protein, 182 aa, Zea mays
MLHFSGVFSLSLSRELTDGSFISSRVHPPATRHSYPPASALRHRYLYSSSFLPPFPPHAFVFVVLQPRNRASYFIVPLTSFVRSFFRVICLGVGGNGGLRPVRARQGAGGGHRLPVRVVRGAFHVLVVGRGGPRRRRQLVRVHLPLRDGLPHDAPPDQEGPVQVLRRQVAVVRVAGGGGRHR

SEQ ID NO: 3551 - protein, 253 aa, Zea mays
MAEAVAVAYEEQRRRQIEMNKRKLEELQLHHLSAAVREAAAAAKPSSAKKRKAPVPRDAATEPPRRSDRLANLPEKPMYREVRVNLPFPEGSKSNARVPLDAANSVVVEPLRWSDRLANLPKKPMYHEDSDEERSYAISKAEELVQELGSSFPIFTQPMTLSHVSGGFWLGLPKHFCREHLPKSDETITLVDEEDDESDTFYLAMQAGLSTGWKEFAIQHKLLDGDCLVFQLIERTKFKVYIIRATLYFESDH

SEQ ID NO: 3552 - protein, 1734 aa, Zea mays
MAAANAPIAMREALTLTSLGIAPQFVTFTHVTMESEKYICVRETSPQNSVVIIDMAMPMQPLRRPITADSALMNPDARILALKAQIPGTTQDHLQIFNIEAKTKIKSHQMPEQVVFWKWITPKLLGLVTQTSVYHWSIEGDSEPTKMFDRTANLANNQIINYRCDPAEKWLVLIGIAPGAPERPQLVKGNMQLFSVDQQRSQALEAHAASFATFKVVGNENPSTLICFASKTTNAGQITSKLHVIELGAQPGKPGFSKKQADLFFPPDFQDDFPVAMQVSQKYGLIYVITKLGLLFVYDLETAAAVYRNRISPDPIFLTAESSSTGGFYAINRRGQVLHATVNDATVVPFVSGQLNNLELAVNLAKRANLPGAENLVVQRFQELFAQTKYKEAAELAAESPQGLLRTPETVAKFQSVPVQAGQTPPLLQYFGTLLTRGKLNAFESLELSRLVVNQNKKNLLENWLAEDKLECSEELGDLVKTVDNDLALKIYIKARATPKVVAAFAERREFDKILIYSKQVGYTPDYLFLLQTILRTDPQGAVNFALMMSQMEGGCPVDYNTITDLFLQRNMIREATAFLLDVLKPNLPDHAFLQTKVLEINLVTYPNVADAILANGMFSHYDRPRIAQLCEKAGLYLRALQHYSELPDIKRVIVNTHAIEPQALVEFFGTLSREWALECMKDLLLVNLRGNLQIVVQAAKEYSEQLGVDACIKLFEQFKSYEGLYFFLGSYLSSSEDPDIHFKYIEAAARTGQIKEVERVTRESNFYDAEKTKNFLMEAKLPDARPLINVCDRFGFVPDLTHYLYTNNMLRYIEGYVQKVNPGNAPLVVGQLLDDECPEDFIKGLILSVRSLLPVEPLVDECEKRNRLRLLTQFLEHLVSEGSQDVHVHNALGKIIIDSNNNPEHFLTTNPFYDSRVVGKYCEKRDPTLAVVAYRRGQCDDELINVTNKNSLFKLQARYVVERMDGDLWDKVLQPENEYRRQLIDQVVSTALPESKSPEQVSAAVKAFMTADLPHELIELLEKIVLQNSAFSGNFNLQNLLILTAIKADPSRVMDYVNRLDNFDGPAVGEVAVEAQLYEEAFAIFKKFNLNVQAVDVLLDNIRSIDRAEEFAFRVEEDAVWSQVAKAQLREGLVSEAIESFIRADDAAHFLDVIRAAEEANVYNDLVKYLLMVRQKAREPKVDGELIFAYAKIDRLSDIEEFILMPNVANLQNVGDRLYDEELYEAAKIIYAFISNWAKLAVTLVKLKQYQGAVDAARKANSAKTWKEVCFACVDAEEFRLAQICGLNIIVQVDDLEEVSEYYQNRGCFSELIALMESGLGLERAHMGIFTELGVLYARYRSEKLMEHIKLFSTRLNIPKLIRACDEQQHWKELTYLYIQYDEFDNAATTIMNHSPDAWDHMQFKDVCVKVANVELYYKAVHFYLQEHPDLINDMLNVLALRLDHTRVVDIMRKAGQLHLVKPYMVAVQSNNVSAVNEALNELYVEEEDYERLRESVDMHDNFDQIGLAQKLEKHELLEMRRIAAYIYKKAGRWKQSIALSKKDNMYKDCMETCSQSGDRELSEDLLVYFIEQGKKECFASCLFICYDLIRPDVALELAWMNNMVDFAFPYLLQFIREYTSKVDDLVKDKIESQKEERAKEKEEKDLVAQQNMYAQLLPLALPAPPMPGMGGPPPPMGGMGHASHGRDGYAADGPWSDASIRNGRLLSGGFAGSLDDDVNCSIASISGTSLEL

SEQ ID NO: 3553 - protein, 392 aa, Zea mays
MAEIEDAMGAPPMVTTTESEGTTTDEDVHLSPTCICGGAGGAGGGGRIKILCSFGGRIVPRPHDGVLKYVGGETRVLAVPRSICFRGGCCSLSPCAVPRCVTCRRLALSRPRCLSLPCAELKKKVEDMFKTEVAAIKYQLLSLAEELDVLVSVTCDEDLVHMLDEYDRLEAKRSPTTSPRFRVYVFTPQATAPHPSAAAPTVPSSTRYAGLSRLHPHHHHHQQHRQFQPERYVATVPASPDGSPPFSAQPHGAVSAGNSPRANALGVGFGMQRVRSSPNLSTLDAAARRLHQHGVDGSISGYVSGSPRHAGAGPMLLQNNFHHYQHQYPTAPVPVPVPVPVPHHGGRYDARGYVRVGNYLAPMVPAARPLSRGGPAPHSDMVTPKKSAIVWD

SEQ ID NO: 3554 - protein, 187 aa, Zea mays
MDGYSNLALSPPTPTPTPTASGAPRAARPSMELTNTKETKAWEGLAIGAVTLARTFSTGSHRFCRSGSERRNHSRSGLLRRAFSMRRHPAGLLGAGDGYWRIHDMDGDSDRGGGGGTVVVEEHGEGEEGDEDEAAAAEEEVQKNKKTEQRDEDAAAGKGKEEAAAERRDKKKRRGGIFKACKKLFRL

SEQ ID NO: 3555 - protein, 420 aa, Zea mays
MMTRRLGHSIWYWRWAPGPEIPAALKYYNPRGQATGMFASICRRRLLRLCQIPFGTGAIPSDALPHCHSLATIADAPVSEPCAALVSCGLSPAAAVAHRLPIRSTAKADAVRALLRSYGFTDAEVADLVRRLSQILSVDPDRIRPKLDLFASLGVKPRRLARYPALLTRSLDKHLVPCIQFLRNILSTDEDVCLAISRTPRALSAGLEKIMRPALDTLRRLGLPDESISKLVVIEMGVLMMSPDRICQIFEALKELGLGVTEKRFPYGIRALCCISREKWLHRVALYRSFGVSEGELQRAFKKQPNIVNFSDEIIKKKIRFFLDVLKVELSEVMEQPAIIGYSLERNIIPRCAVLSLLMREGKIGPNVKLISALLGSANMFSTRYVLRYANELPDVVKAYEGKITFDGFREQDLLVPLKL

SEQ ID NO: 3556 - protein, 642 aa, Zea mays
MSGSSGPLPYSMRDVGAGGAYNNAKFRHRSRLKMVLQSLATNRSKYHCGKFTVGKFLSLLMVSGLLYLFMHKGSEGIVSSELHGKEVQNKNVRRSPSIRTFWRKPPRLPPRLPPNEIYKNNSLLQQSPSEWTSRQKKVKEAFEHAWSGYQKYAMGYDELMPLSHRGTDGLGGLGATIVDSLDTAIIMGADDVVSEASKWIEDNLMKRISEKGQVNLFETTIRVLGGLLSAYHLSGGDHPGAGDSGVPVTYKKANPERLLEVSKDLADRLLLAFTSSPTAIPLSDVILRDHTAHAAPDGLSSTSEASTLQLEFSYLSKVLGDPKYDRAAMKVLEHIHTLPKVEGLVPIYINPSSGQFSGENIRLGSRGDSYYEYLLKVWVQQEEYRDSSLKYLFEMYTEAMRGVKHLLVRKTVPNGLVFVGELPFGRNGGFSPKMDHLVCFLPGTLALGATKGITKRKALETNLLTDEDIENLQLAEDLAKTCVEMYFVTSTGLAPEIAYFHIEGDTEGGPDGGNKSSKYINDIVIKPLDRHNLLRPETVESLFVLYRITEDSKYREWGWQIFQAFEKYTKVDSGGYTSLDDVTSLPPSTRDKMETFFLGETLKYLYLLFDENNTLPLDKYVFNTEAHPLPVMRSAEQASHSV

SEQ ID NO: 3557 - protein, 326 aa, Zea mays
MAMEGPVLCRPAMQAKSPAAALVNNSLTRFGQLGTISKYRNVSRFISPISQPSTKNIGPCCSFSSSSDGNGYMAGNFSDSDEDYVNSTVLEAVEVRSGSEGYVIKMRDGKNLRCVHNNSQGRNIPESAPQPAIVLRIEDGSETLLPIIVLEMPSVLLMAAIRNVHIARPTIYQVVKEMIDKMGYEVKLVRVNKRIQEAYCAELCLTKKHPALQIDDSTDSITFDLRPSDAINIAVRCKVPVQVHRSLAYSDGIRPVEPARMAVAAGLSDGLLFTELDRPDGQASVEAQEFGLVKNMLIAAVEERYKDAASWKDKLMRLRSKRKNWA

SEQ ID NO: 3558 - protein, 574 aa, Zea mays
MPSSVLSSDSMHIGLLAAAAHAAATNSRFTIFFNPRASPSEFVIPLSKYIKAVFHTRISVGMRFRMLFETEESSVRRYMGTITEVSDADPVRWPSSYWRSVKVGWDESTAGERPPRVSLWEIEPLTTFPMYPSLFPLRVKHPWYSGVAALHDDSNALMWLRGVAGEGGFQSLNFQSPGVGSWGQQRLHPSLLSNDHDQYQAVVAAAAASQSDGYLKQQFLHLQQPMQSPQEQCNLNPLLQQQILQQGSQQQMVSPDAQNIQSVLNPNAIQQQLQQFQQMQHAHNDQKQKIQPDQPYQVPSSAVLSSPTSLPSHLREKFGFSDPNVNSSSFISSSSNENMLESNFLQGSSKSVDLSRFNQPVVSEQQQQQAWKQKFICSQSMSFGGSVSLNSPTTKDGPVDNKIGRDVQNQTLFSPQVDSSSLLYNMVPNLTSNVADNNISTIPSGSTYLQSPMYGCLDDSSGLLQNTGENDPTTRTFVKVYKSGSVGRSLDITRFSNYAELREELGQMFGIKGQLDDPDRSGWQLVFVDRENDVLLLGDDPWESFVNSVWYIKILSPEDVHKMGKPGNDPRYLS

SEQ ID NO: 3559 - protein, 778 aa, Zea mays
MYNVGFSLTHAPYRPPAVKKYGGPGTITAVGWQDRQARREFQRDAVITRPPHHTPTFASTSRCPYLLRLCYCWCLSTLLYSLYSPGEGRRGHRGPGDGPDRGWIHFPPTSPLLLNRHLPHPPFLIPRASLAAPCRAMLSPLSALSSAAAAAHAVVAGDGEMRVADGGGGGGAGETGAGLRGGVGGGAVVEDGHGEASGGCSASRGSSARGSSGGDSPLTRFVRRGGRLGTMDPERDEMLTSSSSYASAGSTEPQEEEEEGAGALEAAKDNKRVHGARPQGQTKNAAPCFTRERQDQRHHRLGAVLFQGRKGRAQRPASLDFGCPGVARSSTHSPGFPAAGVAVVNKGMGVSYPSHSRPDVLSSPGTPSCNRRGMAGVGYQQGPRSERVIPPWTGHTSHSGSGMVLPYSTGTGRTLPSKWEDAERWIFSPNPNPNNALGRSVPQLWRPKSKSGPLGPPGRFCGAYSCVSSSAQFLDNGRVGNLTVNAHYMAGMLLPEHICGGVMDWERDASGASGEDSSNGQGGCRPGQMNVRHPAMQPTRVSQQHGSAMESYQSLHASLQSIQDGGIESIKDSATSSAPIILRKDVATQTSPAISRSSSPSTRTSFSRSLSSQQVKELESCFSKLEVRDVQVDDRVTLTRWSKKHVTRGSEKNATNIIECKKKTVDSKSSAWEVTQTAKCISMIEGEEAKMTAWENMQKAEAEAAIQKLVIKLEKKRPYSLERIFNTLRSGSRKTQVVRSTSTANQDQHISRTIKTAPNLSKNGQMSSLSGCFTCHAF

SEQ ID NO: 3560 - protein, 282 aa, Zea mays
MSSSISMMEARMPPGFRFHPRDDELVMDYLLQKLSGHGHHAGAAIVVDVDLNKCEPWDLPDSACVGGKEWYFFSLRDRKYATGQRTNRATHSGYWKATGKDRAVVAGGEVAVGMRKTLVFYRGRAPRGKKTEWVMHEFRLHPHAAPCLLAAAAPNKEDWVLCRVFYKSRTTSPRPESEDARDGTPSAEPQLPAALPLAPLADTYAAPTVAEQVYCFSGLPALPFRRPVSLGDLLEFDASEKESVTTAMTSVSNNTSSVLELAPNCNWNQENGMSRMWSPLGI

SEQ ID NO: 3561 - protein, 444 aa, Zea mays
MAFWGVEVKPGKPYTHIHHADHGRLRICQATLGNCDAAARTVLQCNVGNKIPIKLCSLNPKLAETCHLEVEFEEVDDVIFSVIGHSSIHLSGYYVCASNRSNVGDDESESYGEDIGHSSTDEEHDTSEDSYESDFIDDREVPLSEKYGSGSIDDSDDECTQRCHRQKAEKTTQNAERRRRLKKHQVGSTDYDDDDTPVMKHVAKRCAPKISDSGDDDTPVTKPVVKRRASIFDSDSDEDDNVPISLALGKKDNAKVAEETEHQNGQANGITKKRIIDVKKRKQSSISEDPASSMDMTDANAPSVSKQVDEIKKKSKKKMRNQSGENNEKQSNIRTLDDGLVVEYLSMGNNDAKVASDGCKVYIKYVGMLKDGKIVESNVSEKPYKFKLGAGKVIRGWDVGIHGMRVGEKRKLTVPPSMLSGGKSVGEVPENSSVIYEIELVKVK

SEQ ID NO: 3562 - protein, 418 aa, Zea mays
MAVAAAGSRARAEQARLQWREQEPRSPEMAAPPRPPRPRPARAAVVYYLARNGHLEHPHFMEVALSCPDGLYLRDVIDRLDALRGKGMARVYSWASKRSYRNGFVWHDLADDDYIHPVVGREYVLKGTERLHPVPPPALLDAAAASSSSSGSQETPTSSSSAGWEARGRTAHRMKSASACGAADAELGEYVAYKGEERAADAATQTEDGGRGHGHSHSQRRVLAPAAQEELSRAETTSPPTASTSPETLEALIRADGRVVAAVSGSGRARASSVLMQLISCGSVSVRDASVVPRAQAQAQAHHHHHHHHRARRPPRPPASAAVDLPSYRAKIVEDKEYFSGSIIETAKRSPADDVTSLDLAVLRRSSSYNAERVIKLEVAKEAGDLHDRCIPRKPKGKKDGWLPGHLLQLQRAGAAGE

SEQ ID NO: 3563 - protein, 330 aa, Zea mays
MAFLKTLNPLIRRQATPIAIPRLLLSLHTVLDSSSPTTTAAATPFANAVHTHVPIRSGGPLFLSSAPWMLSQSATPLTAAAAALGAKLHRAQALPGGRALAVAAAVGWEHMRISRGEAEVATSSGIVGYGGERFLNAPNLVSIGRMVSGPVIGWMIVNEWYLPAFATLAISGASDWLDGFLARKMGINSVFGSYLDPLADKVLIGCVAVAMVEKDLLHPGLVGLVVVRDLLLVGGAFYKRASSLGWKWNSWSEFVNLDVIHREKVEPLFISKVNTVFQLMLVAAALLQPEFGTEETQNYIALLSWLVATTTITSTIGYGVKHYRIKPRSR

SEQ ID NO: 3564 - protein, 572 aa, Zea mays
MEMSAMEEALPKAMERRKGGLRTIPFIILNEIFEKVATFGLSANMILYLTERYLMTNAFATVVLYFWHAFSNFLPILGAVLADARLGRFRVITLGSCVSLFGMCLLWLTAILPVYKNTPECAPGRPVGCAVLPWQLPLLFTSFAFMSLGSGGIRPCTLAFGADQLDKRDNSANNVRTLQTFFNWPGAGVVGFAVPVVLMVTALTLFLLGSPFYIKAAANSSVVIGFVQVLVASYNNRHEPLPPETADSSSFYNKAGCKPRTPTNKLMYLNRACVLRNPSKEISPDGAACDPWRLCTVQQVEDTKAVIRVLPIWSTGIMPGVVVGQQMFPTLQAKTMERRVGKLEIPPASFGVFAILTLTVWVAVYDRVLVRPLSRLTGHARGLSLRQRMGAGLVLFAVAMAVAAHTESVRRAAALAEGLRDSNPLTGERPVRMSAMNLVPQHCLTGLAEGLNLIGQIEFYYSEFPKTMSSIGVSLLALGLGFGAVLGSAIVGVIDAGTRSGGSHDGWLPSNLNRGHYDYYYLVLAVLCAANVLYFAVCGWAYGDEGQNRVVAADAAVDDVDDKEEEQKAVII

SEQ ID NO: 3565 - protein, 395 aa, Zea mays
MAALTSALLFTALLVAAQYMLRLLHSFLWVPFRLERRFRRQGIRWPPRSLVSGNAADYRDLLGAARSAPLSSFRHNGVVARATPQYAVWLARYGRPFVYWFGPRPRLVISDPELVKAVMTDSTGGFDKAASGGNNPLARQLIGEGLVGLSGETWARHRRVISPAFNMERVKSWIPEIAAAASSVLDKWEAEGGSRTEFEIDVHKAFHTLSADVISCVAFGSSYEEGKRIFQLQEEQMQLALLAMRTVYIPGFRFVPTKKNRKRQRLNQEIQCSLRKLIEINGTKCEDSKNLLGLMLSASKAGSEYKMGIEEIIHECKTFYFAGKETTANLLTWATLLLALHQEWQVKARDEVLKVCGKHEHPNAENLSDLKIVTMVLKETLRLYPPATFINRDCH

SEQ ID NO: 3566 - protein, 345 aa, Zea mays
MGLDVVEIGMGADLSLDLRHFASKAVRQSKDYAPAPAPDMDACIRRLEEERGKIEMFKRELPLCARLLADVIDVMKEEAGKAVAEEDGAAGDKSKWMSTAQLWTGDCGREDAEPEKQDKERSSPEARSRAAGGAFLPLKAAVGSGAPAFAPLGLRMDDKAAARAGMPDLCLLSPPATKSAAEESRRQVVGFAQAATRAAAATAPAAPSLSVGVQSPSQQARKARRCWSTELHRQFVAALNQLGGPQVATPKQIRELMKVDGLTNDEVKSHLQKYRLHNRRAPGSGVVSQPIVLVGGLWIPQEQSSSQSGSPHGPLHFSTSGIAVSSAATVSCEEEDGRSESYGWK

SEQ ID NO: 3567 - protein, 1325 aa, Zea mays
MEAVKASEARRDPPLLRAVELSRVVAEEGAGAELAGILVSNLCFAHNSPSLWKLLGQAVASRLLCPLHVLALLTPRVLPQRRAQPEAYRLYLELLKCHATSSLLAMEAGPNRDKIGKSIAEALQLSKVYGFSGTEFGHVVILFVLAVVNKLIDSILEDCGFPSVMAEGQESVYAIEGPQPMDLDIKRGSTENQNEHREQLRRKNTFMALDVLHMMAADRKIQSFLSLIFLNMPEKFSSLRQRLSSIEAHKVTLETLLPSGHKINDLLINIWRVCKAGYQPNNKHILGVLGNMGSGGSLLGQLTGAGRPACWIIFDIYVENAIDGKHLSVTSAIGIIKEMTKTMQVLNEASWQETFKALWISTLRLVQRAREPLEGPIPHLDARLCMLLALIPLSIAAILQEESDMFGVEGNKILPQRQGLISSLQDLIQYSGLLVPPSSVVNAANAAASKAAIFKANYKAGAGNTSMMDQTDSSMKAAGNMLHLIIEACISRKLIDTSAYLWHGYVVPSRTLKDTALPQESPWLNFMKGSQLSEPLIDALVATPASSVAELDKLYSVATNGSEEEKTAAAKILCGASLVRGWNIQEHVVSMVVKLLSASLPSDSSTSTPGSMSHYLAHMSTLNEILLGVSYGDVIHILSLYGMVPDVAVALMPLCEAFGSIAPPPNHKSTILGETSVYLVFSCAFLCLLRLWKFYRPPQEYCLTGRGGSVKLELTLDYLLLMHNNRIFSNSSAPNRDSYNSMGSVNEVSAQPIYIDSFPKLSAWYFQNQACIASTLSGLCNKNPVHQVANKILNMICRKMNKGGVSSSNLSSTSSSSVSGSSVSASDDSYQRPAVPAWEFLEAVPFVLEAVLTACAHGRLSSRDLTTSKLIPHIVCGYLLASLFFLLMCYRTAGLRDLVDFLPASLAAIVSYFSAEITRGIWKPVPMNGTEWPSPGASLHSIEAEVKEILASAGVQINSCYPRGVPPMLPLPMAALVSLTITFKLDRSLEYIQGVIGHALENCAGGSSWPSMPIIGALWTQKVRRWHDFIVLSCMRSPFGRDKDAVAQLIRSCFSSFLQSSSSGSDIIANRGVGALLGDSITDQGLRLPMAPGFVYLRTCRTFHDTYFVSEVILKQVIEWAHKLANGWSFNGPPQLKSGRTPLSCAASMAHQVAMLGGGLLCIAGGPLVVQVLYEDTLPTLLLSAREQSLKDPGPVSSTLQGYAMANMLFYCGSLLWGADRSSPVMKLSFLSRRPRVVRNHMDFIAGVLDGHILLGCDPGTWKAYVSQFMFLVVKFVPSWLPDIKLDTLKKIAAGLRSWHEHDLALSLLERGGPQAISVVVETFL

SEQ ID NO: 3568 - protein, 488 aa, Zea mays
MNNLALSMLSPSTSGFPPSPLPSKAATNATAPRCRAAPSGDASLCAFRAHHSAGHALHTNPALMPALAACARLPSAVAEAEQIHALLVKSGGSRAVSHVQAFTSLIRAYARLGRVCDARKVFDGMADRTVVTWNVLLDALIRDGDLDAAWEVFVKMPQRNAVSWNTIISGFARNGWAPVAVDLFIEMTVAYGLAPDEATMVGFVSAVRDIGLLAIGKSAHGYVLRREFSLDGPLGVALVSMYTRCGSMGAAHSCFLSVTTKNVEHWTSLIAGFAAHGQPENALRLFVEMRQVGIEPNGVTFVAVLSACSHGGLVDEGFKYFDLMRSMGIRPMIQHYGCLVDLLGRAGFLKEAFNLASNLPEDPGFVIWSSLLAACRSHGNVEMAELTASKLAEAKPSHGSSYVLLSNTYARAEQWEDSKRTRRRMEEHRVAKKPGLSWIEIDGSVHSFATADKLHIESEGIYHMLEDLKHNFTSAAYEPEPFAISEQL

SEQ ID NO: 3569 - protein, 194 aa, Zea mays
MASLSCASTLPWTPASYPRPSAGRCLTASRRAPSLVIVAQGKVKKYRQVILTDDIEEVGKKGDTLKVRAGFYRNFLLPKGKATLLTPEVLKEMQLEQERIEAEKKRVKEDAQQLARVFETIGAFKLPRKGGKGKQIFGSVTAQDVVDIIKSQLNRDVDKKLVTVPEIREIGEYVAEIKLHPDVTARVRLNVYAK

SEQ ID NO: 3570 - protein, 356 aa, Zea mays
MESCSFRAATAPSPFPSAPSSSSSPRAPCPILRFPRPRKGRQIGVRRRASGFDAFASFAGKVFVDEAIGAEYGEGFETFRMDGPLKVDVDYLNEKLQECFLQRIRHAMKPDEAFGLIFSWDNVIADTDSLKLNAWRQLALEEGKDIPSGAHVRKSIIHGAADHVLRKVLYWAKEEDKMEKLKARLIELYYENLFKLDTPVEGLREWLDAVQTAGIPCAVASPLDRRCMIEALDRMALSKYFKAIVTDEDDMESIANRFLSAAMKLDRKPSKCVVFEDDPRGVTAAHNCTMMAVALIGAHPAYELVQADLAIAKYSELSVINLRRLFANKGISFMDLQKQIIEKSPPKRRLTVDTIF

SEQ ID NO: 3571 - protein, 891 aa, Zea mays
MAVYYKFKSARDFDSIPIEGQFISVANLKERIFESKHLGRGTDFDLMISNAQTDEEYADEATMIPKNTSVLIRRIPGRPRKPIVTEPEETKAAEDGVQDVMPTSGAFLGDSSMKYPEESEWDDEFGNELYISDSVPYQPVCQAVDAIENKVDEDSKIKALIDTSALDYSQIPDGYGSGRGYGRGMGGRMMAGRGFGRGLERRTPPPGYVCHRCKVPGHFIQHCPTNGDARYDVKRMKPPTGIPKSMLMQTPDGSYALPSGAGAVLKPNEAAFEKEIEGLPTTRPVGDLPPELRCPLCKEVMKDAVLTSKCCFRSFCDKCIRDYIINKSMCVCGATSILADDLLPNKTLRETISRILEAPPTSSTENVGSMVQVQDMESALPVQPKHRSPAVSAASKEEAKASTLVEESPDAESLNGTKATNIDASSSDKKALTVPDIAEGTLDSKKAKEDKPVEATPVAKDSQEKFPAGEQAVKKKKKKKPRVPGNAEEQWKNFQDFGTENFSGMPLGPTGAFNPYWGGGVPLPMDYMNAPFPGPMPYMGYPPGPFDPFGGGVLPQDPFMPPGYMMPGVPRDLSELAVNAMGINMGPPVMSREEFDPRKPEHRRRREMDRFNDRERERDRSRERERERERERSLERERERERERGRSLERERERVRELERSREGDRERQRGRDRDRDSRREARASPGAINDSSSMRRNDRSRSQPDRSERGPPQPSSPDRQSRRSSSGKKRSSSDRYDDMPLPPPPPLPATRHEAEPAKAPGSSSKSKASVFSRISFPGDGANPSDAKRSRRASDKPPARSSSSSKKSAAAEGGDGRGHRHHREPAAAEEEKPRPAASGGDYYGGTDGEESEDEEQHFKRRPSSSSRREREQDAPEEQPRHSRRSRDHRRR

SEQ ID NO: 3572 - protein, 297 aa, Zea mays
MSTSWAQRGSTTRSMTSVARHDKWEGGDARISEHGAHGGLRETAVGGTSASWSGIRPGRDEGSCASRASRESAERNRELRAEGQGAKARESRARRAENFARGHGKAGAAGLNELRQGAAAGCEERGWARCRKRGPRRTPNRTMDAAGKLHGIHGRERAPRAEDWARREQRVAAPEEQRWSADELEQALGKGPSREKTWQPARIRGEQKAKRRPWEQARLPGAIAPDAWAGWETTRARGELEQRAGRSGAAAGRASVEHPGELQRPSRGRTSSRHGRGKSDQRRSQRRGMNLAERYGA

SEQ ID NO: 3573 - protein, 650 aa, Zea mays
MEIFQVTTMILQHPLLTYFFSALLLTQLLTAPIAAAETTVKVSTTPIFPEIPQGQARKDFQVLVRVEAPARPEARIPIDVVAVLDVSGSMNNPAAAPTERTRTTSRLDLLKTAAKFMVAKLEDGDRLSIVAFSDRPVRELSSGLLYMTADGRRNAIRSLDQLEARGGTALVPAFEEAVKVLDGRQGDGGDRLGFIVLLTDGAEDASGSFTLSERRREVIRGALRKYPVHAFGLGTAHGPEVLLYLAQESRGTYSFVDGDNVGEVAGALAVCLGGLTTVAAVDTRVVLRADELNGVRVDRVDSGGHDSSVSCGGTSCEVSVGVLYAGEAKHFVVHLHVPAITATASASTEGGYYCDGLGVCDHYRHHRHHRHGQHLLAVGYSYRSHPSARAITVEAHGVFVQRSPAVLDLDGGRHAPVIPSPSPVVLQHIVRFELLEVVANSLVRGELISNDDRARAADVLQVKWEEFRACHQFWGGGLLDLMSGLEKEVDGMVGSLRAGVAAYVYAWVSSHQMQRATSIGSPDKAAVEFLTPAMRLLLEEARKLPRWQQAATTTAAPTNVQYAGCVGGGGFEMVDRRLELWSKMKRDVQLLVSVQEQAAADEEEQHLAAVFQEASLAAIDRAMHRDIYLAAVYASKQTRCHSVGCQQVKD

SEQ ID NO: 3574 - protein, 326 aa, Zea mays
MHTSSEVAAPMTWLVLTLLLSSAVYFCLLPLIFCPSIGWHPPTIYISPTHTHVPQAAAVETVKVVTTPVFPQIPRLQASKDFQVVVRLEAPPVAQQKARVPVDLAVVLDVGAGGGGSTGSARLDAVKKAVKFIIGQIHDNDRLAVVGPSPNRRLVIGFPSTHEARQNAEKSVDDLEPRGEFASGAGLEEAVKILGELPATASGSSRARFVILVTDTAVTEGSGGRFGKLRRELLPPVHTFGLGAGHDPRALLSIARESQGTYSFVDDQNTDGITGAIAICLSGLKDVVAVGTRVRVEAPVGSGALVRASNLTRCDDAARVELFLPA

SEQ ID NO: 3575 - protein, 156 aa, Zea mays
MYPPSIQERERERLKSAGVQRREERPRASWRHRSSRAVIQNYIFLLNLCRSSSPRRRRGRSRRAGLTARKRAYGIRGKAEGKGTLGTAQKRAEGKHLALSSSPVSNQHDGGRGEQRGKGTHHAEELAGQAASSRVKEAALDLRTRRAREVPCPAED

SEQ ID NO: 3576 - protein, 165 aa, Zea mays
MNVEKLKKMAGAVRTGGKGSMRRKKKAVHKTTTTDDKRLQSTLKRIGVNTIPGIEEVNIFKDDVVIQFVNPKVQASIGANTWVVSGTPQTKKLQDLLPSIINQLGPDNLDNLRRLAEQFQKQAPGASGAEAGASAGAAQDDDDDVPELVPGETFEEAAEEKKESS

SEQ ID NO: 3577 - protein, 322 aa, Zea mays
MMSFKGHEGFGQVAAAGAGSQAASHGGAGPLPWWAGPQLLFGEPAPPSPEETRRDAQFQVVPGVQGTPDPAPPKTGTPEVLKFSVFQGNLESGGKGEKTPKNSTTIALQSPFPEYNGRFEIGLGQSMLAPSNYPCADQCYGMLAAYGMRSMSGGRMLLPLNATADAPIYVNPKQYEGILRRRRARAKAESENRLAKGRKPYLHESRHLHAMRRVRGTGGRFVNTKKEGRGTGVASNGGSKTAAAAPSRLAMPPSFQSSVASLSGSDVSNMYSGGLEQHLRAPHFFTPLPPIMEDGDHGGPPTRISSSFKWAASDGCCELLKA

SEQ ID NO: 3578 - protein, 629 aa, Zea mays
MASVKLGSKPDAFKRQGQAWFCTTGLPSDVTVEVGDMSFHLHKFPLLSKSAFLERSIEENSDQEECIIKLNDIPGGAKSFELVARFCYGVKIELSPANVVYLRCASEHLEMTEEVAEENLIAQSEMFLNQVVLRNWKDSLAALETCDDLLPHAEDLQIVNRCIESLASKATSNPNLFGWPIREHGMMQSPGGSVLWNGISTGARPRNFNSDWWYGDASSLSFPMYKRLISTMESRGIRPEIIAGSLTYYAKKYLPGLRRHSHSMGTMPLTATLSEVEQKKLLEEIDRLLPLHRGIASTKVLLGLLRTAMILKASPTCISNLEKRIGMQLDQATLEDLLLPNFSYTMETLYNVECVHRILDHFLAMDQANGGESPCLDDVMASPSLTPITSVAKLIDGYLAEIAPDINLKPPKFQALASAIPEYARPLDDGLYRAIDIYLKAHSWLSEAEREQFCRLLDCQKLSLEACTHAAQNERLPLRVVVQVLFFEQLQLRTSIAGCLLVSDNLEGSRPLRSGIATSGEAGGWATAVRENQVLKVGMDNMRTRLAELEKECSSMRQEIEKLGGRAGKGGGGGWASRVVPRRLGLKVRSQMCSAQEGSVSEQHRSMSAKLDKLQAKVSKQKKQLAADA

SEQ ID NO: 3579 - protein, 343 aa, Zea mays
MGHKYTPTYYSGLQDTIASLCKSILPSFRVGRRLTSDQAAARRHAEQLKWQQESFHRILHLAALHREGIVPAHDVAAFRGTMLAALVAPPPQHPEQPAVLRDKLLFLQELLYAKCVSAAEYNASKAPLVRRLAAFGGGVVECPDAEASAEEWSEIDLRDPPPPAGAASSDKPKHKAFITPWESRSRKDQDANRSASRPPLAPVDHNNANNASVLMPEYSPSEAVPCRKAEKGRRRHLAGMFHSGGNGTENKEPAGEEGGVDEKATVKCKKKSSWGFDGIKKWKKAGACNNNGEAAATGEQPQRTPPRSSYSECQLEASPMAASGPDAKRAKTRLHSSTDDDCF

SEQ ID NO: 3580 - protein, 356 aa, Zea mays
MASPSCFLFRPRPPLCSRRRRSSSRSLYLLSKQSLHRLPSPRTCRRPVAEQLVLRSLPPGNGRRMGATGFACYCSYDTENGLPTPSPDKGKSSDEWPILRRWDVPWEWPTISLTMVACAVSFLLTGIAEQSILEQLGFRAGETTLDEKAEILFLGQLSTTVVVLGVIFGMTNTFRPFSDDIFRYEFNEPLKLQNGWLLWSAIGLFVAIVAIALAGAAMTFLNGETPQRETDSLVLLLPLIGSSNISTACLLGITGILAPILEETVFRGFLMVSLTMWFPTPYAVLMTAAVFAFAHFTPGEFPQLFVLGVVLGFSYAQTRNLLTPIAIHAVWNSGVILLLTFLQMQGYDIREILQAS

SEQ ID NO: 3581 - protein, 592 aa, Zea mays
MEDVAPGAEPWEGYVDWRNRPATRSRHGGMAAASFVLVVEVLENLAFLANASNLVTYLMGFMHYSPSQSATAVTNFMGTAFLLALLGGFLSDAFFTTYTIYIASAFIELMGLVILTVQARTQSLMPPQCAKPGAPCEPVSGAKKAMLFAGLYLTALGVGGIKGSLPSHGAEQFDEHAARGRKGRSTFFNYFVFCLSCGALVAVTFAVWVEDNKGWQWGFGISTIAILLSIPLFVAGSSRYRNKVPTGSPLTTIAKVLIAAALARRGCAPSSSNGAVIDRAPSPTGSTDMKEYCKPGDMEEITVSGAAIVASSPAEPSRELAFLNRAVQCQPPRHGRLACTVQEVEDVKIVLMVLPIFLSTIMLNCCLAQLSTFSVEQAATMDTRVGSLTVPPASLPVFPVTFIIILAPVYDHVIVPFARRVTGTEMGITHLQRIGTGLVLSIVAMAVAAVVEVKRKNVASHNGMLDSTKPLPITFFWIAFQYLFLGSADLFTLAGLLEFFFSEAPPRMRSLATSLSWASLALGYYLSSVLVSIVNSATGRGDHRPWLQGASLNHYHLERFYWVMCVLSTINYLFFLFLAVRYKYRNAGVIKG

SEQ ID NO: 3582 - protein, 953 aa, Zea mays
MRAYAATPAAVATLPSAAPPLTPDAAAVLSRAAADASRRRHAHTTPLHAAAALLSGPAPLLRDACVAGLASPHPLRCRALDLCFSVALDRLPTSTELQHHEGGAFHHASAAPPLSNALAAALKRAYAHHRRIGSGGVETDDHRVGVPHLVLAILDDPSVARVMREASFSSTAVKAAMLRSLSDPAAPDAAAYVSARVMHRQASHREEEVAKVVEVLKRAKKRNPVLVGDTVDVDAVVQEVVTLIQRQRLGNARVISFPKEFGDLVDMDRARLTAKVKELGEAVRSASASAGVVVNLGNLQWLVEERCAAPRGEQQQEKRRDVVLDTARAAVAEMARVLNLSGEGEHRVWVIGTATCATYLKCQVYHPALESEWDLQAVPITPRPPPPPPPPLGLSPSAGVNRGILSSSVEVLSTAMTSPMQRAPSLCSACAEGYERERAEMASSERAPCPAEQPMSQWLQIGTPSSGRPADRAQEKAREADELRRRWRDRCAQLHSHGRPPLVTCSEWNGASILASMQAAPPVVPVRPLVQRRVAVDTDLALGLAAARPACETDDKLLVRRLTEAVRWQPEAAAAVASTIAKARSSESRRRRTTAGVDAWIVFAGPDVAGKRSMAEALSKSVFGTGAVTLRLGWPQAGDDGGESVVSCRGQTALDRMAEAIRANPFRVVVLDGVDHADSVVHASILRAVESGRLSDSHGRDVALGNNIFVVISQWSPPLPEPEHLRKSQEAEPFLPDSQWNLEHGMTAGGKKRRPEQQLEGDRRTKARKHSAREPLPLDLNLSMSDDHTDAVDDSGGEGSRNSSSDLTVEHEQEYVQPAHSGRCSAAPLTVSELIKAVDGVVVFKPPVSLEPLKRSVSDLVVPAAKLGEITVGGWPVHVDDGLLGRLAARAAGAAAAGTPMEAWTTGEVLCPSSMRQFKRSLSSNDVDGATVEGSRRRKDGEMFPMPVTVDGN

SEQ ID NO: 3583 - protein, 232 aa, Zea mays
MEDWDSEEFQPVVPVVKAEPLKNQWADEDVEEDDVKESWEEEEEEEKPKPAPVEKVAAKPSTKAPAKKGKQQALTSAEEPDEPPLSPTSQKIRQQRLVEEADFKSTTELFAKKGSEQKSLDTFIPKSESDFAEYAELIANKLRPYEKSFHYMALLKNVMRLSMTSLKGADAKDISSSVTAIANEKIKAEKEAAAGKKKQGAKKKQLHIEKGDDDFIPGRGGGYDDPDEYDFM

SEQ ID NO: 3584 - protein, 160 aa, Zea mays
MEKEHIKMAMLRQEQTFRQQVHELHRVYQVQKQLMMQMQIAKTNSYGNEAAERQTKPTEKLEHRQWCGSSGKTEAKLAEDFSLELTLATGAGRRGEEEKPSNSDSEATMSSSTSAESEPGQGFAPKSDVTNLRFQNESSRHDAQVLQSPWRYQCLSLKMA

SEQ ID NO: 3585 - protein, 405 aa, Zea mays
MLTCIACSKQLPGDAPPLREPSDDDDRANAGGGGESAATPGTRQAIRVLTAQIKDMALKASGAYRHCKPCAGSSSPAASRRQQPYYHGAYAESGSDRFHCAYQRAGSSAASTPGLRTGGAMSSGDITPSVSARTDFLADDEEGDDEEGTATGSSEEDEEKEWVAQVEPGVLITFLSLPRGGNGLKRIRFSREMFNKWQAQRWWTENYEKVMELYNVQKSNSQVDPLPSIPRSDSEISKDDTPATAPLNKGQLLRTSPRPLKGSEAIGYSSSDCPQHQSSHFRNVYRKDRYLGHQFCDPVELASTPELSSISGAKTETSIGASVRTSSSPEEVDGSGELSASVSNASDEEREWVEEDEPGVYITIRALPGSIRELRRVRFSRERFSEMHARLWWEENQARIYEQYL

SEQ ID NO: 3586 - protein, 286 aa, Zea mays
MANRKSTTDPDAIDELSDFNDLTAAATASRVPNSTPTSRSANTTVGRAGNTGKQRSARIKAKHRRTHERELDMGSGSRPRRAGWARRWRSCREKHPASQQETQAKSRPANAVKMARPSAVSGASRTPSRGSRRTEKPARSHGGRNLAGRGHERSLVWSRDQGHTMANWNRRAEGRWQMTGLRQQRNRRPRTRPELHVDTPWRHGPSRKLRGEQRTPASMALTGRAEGRETAVGETQRKLGTRKMGVASSRLGRDGVLNCWKGKGWVGARAMRRRLSAVVGSSVGRR

SEQ ID NO: 3587 - protein, 286 aa, Zea mays
MANRKSTTDPDAIDELSDFNDLTAAATASRVPNSTPTSRSANTTVGRAGNTGKQRSARIKAKHRRTHERELDMGSGSRPRRAGWARRWRSCREKHPASQQETQAKSRPANAVKMARPSAVSGASRTPSRGSRRTEKPARSHGGRNLAGRGHERSLVWSRDQGHTMANWNRRAEGRWQMTGLRQQRNRRPRTRPEHHVDTPWRHGPSRKLRGEQRTPASMAGTGRAEGRETAVGETQRKLGTRKMGFASSRLGRDGVLNCWKGKGWVGARAMRRRLSAVVGSSVGRR

SEQ ID NO: 3588 - protein, 135 aa, Zea mays
MGPRERHAHWGEGHLLLLLGSEGRREPAMKVLGQGGSMEREPASRAQLAQRWPSAKDELGAQPATPDKVQKDRALEVENAMREITSPLGPGGEVLGGVEPMKEQDAMGVATGEMAPCLLLCGRQRMAWGEEWLAN

SEQ ID NO: 3589 - protein, 610 aa, Zea mays
MPPCSDLSIFQTNGKAVGPPKAYHLSMEERKSALLYMFTNMPEVEKYFVLPPKSKKSVKGLFKGLGLFQGSSSSSSRRRELLSAVHGDENEQHTEEQHIEEEQHNEAEQHNEEVEHNEEVEHVTWDQAAQHHQPWDQWDHQREQQQAWDQWGQQGEPADNPMDDGSGGSSATRTRRSRKSHSVKPRHAIEREADRTLIMPHGDRNWEDLSFDGKGHHTQVNLTLGSLCRLHYPGIVKVSNGDTEDEVLVSTWDEYKFKKERNHTDRQGLVRNDFWLRYRLPDGEDYMGHAERVLQNNAKKLVKDVIYYARIQATNLYFQKHPEEAGPLNKKEGSSKIYLTEDQYREVMVPWMAPVPDAYYAWCRYWASEGFQKASAHHRQCRGTNLNHKFGGDDMIRKAKRMEATSGQKPSDIEVYQEGHKGPDPNNPDQLCSQTAMDRLVSFGSKVQTFKVYKFLHLYALFDGFIDSSSVRSQRTSSSSRSSCSRRPNEQELEIMRMREEMRQQREFMEACNAHNQAMYQLMQQQGMATNFPPPPQWSQFANTPVPPPQFTTPPTHIPAPGDRVTPEAGGSGSDPAVGTGFVDSLFAFPPPGGGGGSGQSSNHPSGGYL

SEQ ID NO: 3590 - protein, 889 aa, Zea mays
MSTCVEQPTHSASLDPTAAQRLPYPDLPVDILRRSSVRGSGFVAAALVSSARKADDDARHDDDDPSGDRHETYGSHYLANLGVEQSVRDEGTVDAWVESSQSLIRLTGKHSLNGELPRLMRHGFITPVPRHYVRNHGPVPRGDWATWTVEVTGLVRRPRALTMDELARDFPALELPVTLVCAGNRRKEQNMVRQTLGFNWGPGAVSTSVWRGARLSDVLRRCGSMSRKGGALFVCFEGAEDLPGGGGTKYGTSITREVALDPTMDVMLAYQQNGGPLLPDHGFPVRLIVPGCTAGRMVKWLKRIVVAPAESDNYYHYRDNRFLPSHVDAKLADAEGWWYKPEYVINEMNTNSVITTPAHNEFLPINAITTQRIYTMKGFAYSGGGKKVTRVEVTLDGGENWLLCELDHPEKPTKYGRYWCWCFWSIDVELIDLLACKEIAVRAWDQSLNTQPEFLTWNLMGMMTNCWFRVKVNVCRPRHGEKAGLAFEHPVRTNQPGGWMAQQKHLETAERTSAATSTTNQQFTMSEVRKHASQDSAWIVVHGHVYDCTAFLKDHPGGADSILINAGTDCTEEFDAIHSDKAKELLDTYRIGDLVTTGGAEQRSPLELAPSPPIRHEGPAAPVIALSNPREKVPCQLVARTVLSRDVRLFRFALPSSGQVLGLPVGKHIFVCASIDGKLCMRAYTPTSSVDEVGHFDLLVKVYFRNENTKFPDGGRMTQYLDSLPVGAHVDVKGPLGHVEYVGRGGFVIDGKPRKAGRLAMVAGGSGITPIYQVIQAVLRDQPEDKTEMHLVYANRTEDDILLRAELDRWAAEYPERLKVWYVVSQVKRLDEWKYSVGIVTEAVLRDDVPEARDGTLALLCGPPSMIQSPILPNLEKMKHQLDDSVVSF

SEQ ID NO: 3591 - protein, 333 aa, Zea mays
MAASPVAIGTAVFQRGPLRVEARHVDYSQVPSVPKPLMVVAPTDAGVYPVAVFLHGCNTVNSWYESLLSHVASHGFIAVAPQLYCVTLNMNDLKDIDATRQVTAWLADKQQGLAHVLANILQLHGVRPDLSRLALAGHSRGGDTAFAVALGLGPAASDDDDNNADAGTSPAALPLKFSALIGVDPVAGLSKQAQVEPKVLTFRPRSLDPGMPALVVGTGLGPKHVGGPPCAPAGVNHAEFYDECAPPRYHVVLRDYGHMDMLDDDGVPYVINNCMCMRNTKDTKDLARRAIGGAVVAFLRATLEDDDEDLKVVLENRPGLSPAVLDPVGHDLA

SEQ ID NO: 3592 - protein, 1064 aa, Zea mays
MGQPGMDSVPGKENNGIAPNLNGVVSPAKQQLEGKEAMRYANILRSRNKFADAINLYTIVLEKDGTNVEALIGKGICLQAQNLPRQAIECFTEAVKIEPGNASALTHCGMIYKDEGHLVEAAEAYQKARMADPSYKPASEFLAIVLTDLGTSLKLAGNTEEGIQKYCEALEVDNHYAPAYYNLGVVYSEMMQFDMALSCYEKAALERPLYAEAYCNMGVIYKNRGDLDAAIICYERCLTISPNFEIAKNNMAIALTDLGTKVKIEGDINRGVAYYKKALYYNWHYADAMYNLGVAYGEMLNFEMAIVFYELALHFNPRCAEACNNLGVIYKDRDNLDKAVECYQMALSIKPLFAQSLNNLGVVYTVQGKMDSAASMIEKAIHANPTYAEAYNNLGVLYRDAGSITLAIHAYERCLQIDPDSRNAGQNRLLAMNYIDEGSDDKLYEAHREWGKRFMKLYPQYTSWDNSKVADRPLIIGYLSPDYFTHSVSYFIEAPLTHHDSTVCKVVVYSGVVKADAKTLRFKDKVLKKGGLWRDIYGIDEKRVASLVREDKVDILVELTGHTANNKLGTMACRPAPIQVTWIGYPNTTGLPTIDYRISDSLTDPPMTKQKHVEELVRLPESFLCYTPSPEAGPVCPTPAISNGFVTFGSFNNLAKITPKVLQVWARILCSVPNSRLVVKCKPFCCENIRQKFLATLEELGLESLRVDLLPLIHLNHDHMQAYSLMDISLDTFPYAGTTTTCESLYMGVPCVTMAGAVHAHNVGVSLLSKVGLGRLVAKTEDEYGAISSEIISNAMMRDKSETQGTLKRFLRRAKNEFELKVKKIRSDNGSEFKNLQVEEFLEEEGIKHEFSAPYTPQQNGVVERKNRTLIDMARTMLGEFKTPECFWSKAVNTACHAINTVYLHRLVKKTSYELLTDPDWVLAMQEELNNFKRNEVWTLVPRSKQNVVGTKLFQMDVKSAFLNGPIKEEVYVEQPPGFEDERYPDHVCFSRVMTQKFEMSMMGELNYFLGFQVKQLKDGTFISQTKYTQRLRWGPTDTPTSTKKEEYIGDVPILRKVPGVMEF

SEQ ID NO: 3593 - protein, 443 aa, Zea mays
MASLVVRAAGAAAAAARLPSLRPRRNGSGVLSGLRVGTGHYGARLALASSTASHKEFKIACLTVDDSSLGPGDEYESDPRMPGEDEFDHFYRVLAKKTDNLLSCYIPMPLALSEEEKAVQKEFKLIASGCIDLLVGAMRRTPAEKRRPLFLVFGELYPVFEFVRWTAEAGCAKWWMALQIIEKLEIVRKMVSSAFGGAPVDRSMVFARKVDLTGVDGEALAGHGLGSNLSVVIFVLMDSVFSNVKSDIDAMVSDPCRMADEDVQEFDHYYRHLAKRAAKLHAIYPPELPKPLSESEDEKAVQERFKEMANESIDLAAGAMRRIPAEKWRPLISVFAYVFLVFVRVRWYAERGCAKWWMAPQIIEGLQTVRRMVSSACGGTPLDIDKVFDRMVALSGVSVQAAPGGHGVVGSNDLSEVIFALIDNVFGNVKSDIYDMVSASTPC

SEQ ID NO: 3594 - protein, 818 aa, Zea mays
MKNVDRPPSNPKRIIIQSTQECFSVDIPRAPAGTVRPETRHAANEDDDFMPLSKKRNLDDNPGKVLKKRLNVRCNPQDVLVSIQILNDRQQQAIARRGFSSILDMRLDALGSRSHLAWLMEKLDHNDMTIRAGPGKELKITKDTVHLILGLPNAGGGTALGIDEAVAANNLRAELDLSKEEFGVTALQDRRLRKGSDDDLSIRCFFLILFNRLLFPTVSWGITNHEVLLTEEMDRFHQMDWCQLIFNDLCQAAKKWHNRSVTNVSTTTYGCSIVILLYYLDHLHDSAAPQNKRGTPRIKYFDRNIIQALTRADKGKIRKGEEAFGHCSHKTRTNTFDVPRPDPSGQHSIHIELPLIRDLISSKLNQLPSRHRLGFIEKLSHFDAEVGKACSVIKQTLQQIVEKQYNLSDVFGELIDEVLRAEAGDNEDAYDVQKTTSKSDDIRPQTAEGCTCPATLTVPDMSTPVSQQDTQFTDTQGKHGDGGKNMPTNTNVTPKATPHMDPDAPIFDATPQIKVYVETDQATNTPQVGQASLDSEMQTVLALREYLCGLQSDTGRTIIDYGEYSATCSDIYKSFADGKCLDNVFMQCFTQCVIDDAKNQQTSMSSNSLILDVNIGSLLNFEEHERHSRNPQPFDESVLHTLLDNSLPEIDELDQCKAIMVPMVSRGHWTLYVVNKVKKCIHILDSNPYGPTLGGTTWKDYHFAHLGSGGRKLPWAKVIMSRLNKAIQHVRPSTCFPKFGNFTIDLCPNCPNMAAGSNDCGFYVMGYILFYQCDEGFLRSDIEAGNTSEIRSLALHYITFHPKNKALSLLQDIQRFKV

SEQ ID NO: 3595 - protein, 382 aa, Zea mays
MAHGGGAGKAKVTPNLAVDGEGTRTLNRTVLQRLDPAVEDILITAAHVTLYDFDTDVNQWRRKDVEGSLFVVKRNAQPRFQFIVMNRRNTDNLVEDLLGDFEYQLQAPYIMYRNAAQEVIGIWFYNSQECQEVANLFSRILNAFSKVPPKPKIPPVQSEFEEVEAAPVLVDGPLEPQTSNIMSTTTHIQEDPLSAFFSAAANAGGNSAVAVARQPIQLFGATPVATHAATSITTIQSPGLHYLLPSQASSVSGMPADAHGSIGRSTNLVNPSLFSPLTSSQTTMVCTNSVVAIAPPQHPQTAQQPQSAPLLQPFLLPTASPSPPYGTPLLQPFPPPNPSPSLASAPVLSPALSRDKVRDALLRLVENDEFIDLVYGEIMNRQ

SEQ ID NO: 3596 - protein, 504 aa, Zea mays
MRPLPASVASRLAAVLADPVGVPLPVFNSLLSALAASVDPSHGHLPLYLFRRRLLPFRRPDAFTLSVLTSALPSAAVTLHALALRLGLLHADPVLANSLLRLYICPPVPCQGLARRLFEEMPARTASSYNTLISHSHDDVWGLVRRMVADGCAPDRFTMSAVLPVCTSARWGRELHCYAVRDWMCGDDDFHVSSGLVSMYCRVGHPDSARTVFNRMARRNVVCWTAMVGGYIENGMFDDAVDCFRAMWLIDAIPPNRITLITVLSAIEALSSLAEGKQVHGFAVRMMMHAEMSLNNALIDTYAKCGALHYARRIFDDTSWCKDVISWGAMILGYGIHGMGVEAVALFDQMLSSGVKPDSIIGLGVLSACCHAGLVLKGLNTYSSMVNDHGVHPTEEMCACMVDLLGRSGNVYHALDFVKSMSVEPGSSVWGALLDASVKYDNKEIQDLASRSLLRLEQGKPSNLVAVSNLNASSERWNIVKQVRDTINQGSLKKKTGCSWVNPI

SEQ ID NO: 3597 - protein, 147 aa, Zea mays
MELHGMRFSGFMVQLWPRDRVKSAAPTPLLPLSSPIKGSIPFCTPSQRSSNLLVNLYSSPPLRCSRRRHITPIGAADAVCRRRGRPEADTVLPSTFLRAVLCSSPSFESSEANCVVEDSNLIEDNPQDMLEQEGDAGDFDGDFDDEF

SEQ ID NO: 3598 - protein, 506 aa, Zea mays
MGPPPEKRRTLVLVNLASIMERADEALLPAVYREVGAALHATPTGLGALTLYRSIVQAACYPVAAYAASRHNRAHVIALGAFLWAAATFLVAVSDTFLQVAISRGLNGIGLALVIPAVQSLVADSTDDDNRGTAFGWLQLTSSIGSVFGGFFALLLAQTTVLGIEGWRIAFHLVAIVSVIVGTLVWFFAVDPHFPTNDAAPPSSKKSALDEARELIMEARSIVQIPTFQVFVAQGVSGSFPWSALSFLSMWLELVGFSHEDTAVLTTTFAVATSVGGLLGGKMGDSLARRYPNAGRIVLSQISAGSAVPLAAVLLLGLPDNPSTSSGVAHGLVLFVMGLIISWNGAATNCPIFAEIVPEKQRTSIYALDRTFESILASFAPPVVGLLSQQVYGFKQDDGRGSSPGQDRENAASLAKALYTAISIPMVICTSIYTFMYRTYPRDRERARMQSVIQSELDQIELLGGPSLGGGGDGDGDKPDEVDGSYGSERSAEADAGTEKLLGRKP

SEQ ID NO: 3599 - protein, 217 aa, Zea mays
MPAMATAPVKFSVATNSPCVQPSLPLRRTPAAISFPCRPWSAAMNSCTGLLRRSDVVAAAGHQKLMGSLTTNEGLRFGVVVARFNEVVTNLLLQGALETFERYSVKEENITVVSVPGSFEVPITAQKLGKSGKFDAILCIGAVIRGDTTHYDAVANSAASGVLNAGLSAGVPCVFGVLTCEDMDQALNRAGGKAGNKGAEAALTAIEMASLFRHHLG

SEQ ID NO: 3600 - protein, 174 aa, Zea mays
MAEDAPNAVAEGSQPAASEGSADAALPAAAGAKAAEALLPSLSIWPPSQRTRDAVVRRLVQTLAAPSVLSQRYGAVPEPEAERAAVAVEAEAFAAASKSAAAAAECPASVEEGIEVLQAYSKEVSRRLLELAKTRSAAAAAAPAPAEGSAQAQESAEASSATAPPTEEAAVNEE

SEQ ID NO: 3601 - protein, 1520 aa, Zea mays
MSYRKGLKVWVEEKGEGWVEAEVVEAKERAVVVFSSQRKKITVSPEKLLPRDTDEDLGGGHVDDMTKLTYLNEPGVLYNLKKRYALNEIYTYTGSILIAVNPFTRLPHLYNEYMMEQYKGIRLGELSPHVFAVADASYRAMVNDSRSQSILVSGESGAGKTETTKLIMQYLTFVGGRAALDDRTVEQQVLESNPLLEAFGNAKTVRNDNSSRFGKFVEIQFDSSGRISGAAIRTYLLERSRVVQITDPERNFHCFYQLCASGKDAELYKLGHISSFHYLNQSNTHDLEGTNNEDEYWKTKRAMDIVGISREDQDAIFRTLAAILHLGNIEFVPGKDADSSKIKDSTSNFHLQTAAKLFMCDSDLLVSTLCSRSIHTREGIIVKALDCAAAAANRDALAKTVYARLFDWLVENINKSIGQDVDSKLQIGVLDIYGFESFKNNSFEQFCINFANEKLQQHFNEHVFKMEQEEYKSEEINWSYIEFIDNQDVLDLIEKKPIGIIALLDEACMFPKSTHETFATKMFRNFSSHLRLERTKFSETDFTISHYAGKVTYQTDSFLEKNRDYIVAEHCNLLSSSRCPFVSGLFTSLPEESIRSSYKFSSVASRFKLQLQALMETLNSTEPHYVRCVKPNSANRPQLFENQSVLHQLRCGGVLEAVRISLAGYPTRRTYAEFVDRFAVLVPELMIGSYDEKMMTKGILEKMKLENFQLGKTKVFLRAGQIAILDMRRAEILDNAARHIQGRFRTFITRKEFVKTREASISIQAYCRGCLARKMFANRRETAAAVIVQKYVRRWLLRRAHLQACLAALLIQSYIRGFIARRYFSVIREHKAATVIQSTWRRRKFVILFQNYRQATVAIQCSWRQKLARKELRKLKMAANEAGALREAKNKLEKKMDDLALRLTLERRLRASSEESKSVEILKRDKIIESLSAECAAAKSAAQNEHAKKLLLQKQLDDSLREITMLQSKKIMSAEAAEENSNLKNLVESLSTKNSILENELIVTRKSSDDTMEKLKEVEGKCNHLQQNLDKLQEKLTNLENENHVLRQKAFNMPTMNNLSVAPKTLSEKFSASIGLPNSEPKHIYESPTPTKYLASLPQTLSTSRRSRLPVERHEQNHEILLRCIKENLGYKDGKPVAACIIYKCLLHWRAFESERTAIFDHVIEAINDVLKGNEADGRLPYWLSNTSALLCLLQRNLRSNGLFTTPSRRSGGALGKIAQTLRSPSKFIGRSDTLPHVDARYPAILFKQQLTACVEKIFGQLRDNLKKEISPLLNVCIQAPKSTRGQSGKASKSSGVGAHPASNSNWDNIVNFLDLLMDTLRENYVPSFFIRKLITQLFSFINIQLFNSLLLRRECCTFSNGEYVKAGLSLLEKWITDVTDEFAGTSWHELNYIRQAVGFLVIHQKRKKTLEEIKQDLCPSLSVRQIYRICSMYWDDKYGTQGISTEVVAAMREMVNKDTQNLVSNSFLLDDDLSIPFSTEDLSMAIPSIDYADVDLPESLQHYTSVQFLLRQQDPQPAQ

SEQ ID NO: 3602 - protein, 207 aa, Zea mays
MASPPSIHGRSAPLRPKSRGWKAEEKAVSCGGGGASEIPELAVIRELHLRTIDELGLDKSIVSGTQSTSQSGRVAKAGERCRRQSSNNGGMRRKHAKSIKSKFNDLMSTHPPLNEAYSDVCVFRMSSANDASACPIRLWHRNLILDSIEGLQCRHRHSWKSSTDGHRAPRWAVLSTAARTACVGAILTPAPTSAPATQHADDTSSSL

SEQ ID NO: 3603 - protein, 330 aa, Zea mays
MWEGGGSHAHEALLLQAAGSGAADYGHAGPSLLRPWLGPAAASGFSYMAPNHAQPGPLGAEAAVASRFGFGGGGYSDGGVEQEQFVVIGSAETVPPRHSLQAAGVGGRTTALLPHGPRMVSGLLGTLQAELGRMTAKEIMDAKALAASRSHSEAERSRRQRINGHLAKLRSLLPNTTKTDKASLLAEVIEHVKELKRQTSAAARQRHLLLPTEADDLFGGRRGGRRRRQARRAGVAVLRGPRGPHPRHRPRARRAQPAGPPRRDRHARRPRPQRAPHHHCRRRRRGRRGPRRRRVRRRLVQPEARARRVHPGSAARRHGPQDGEQRHVLI

SEQ ID NO: 3604 - protein, 458 aa, Zea mays
MRSSRRCAACRGFLQGGEHGGGARSSRGTDQEHWRGEEIEEALCFLGVPRQQLGAGEPMACSSCPSLPSPPCSPDSARIWYYLAHRAVLDNTTTTTRHRCGAVGAICDAPLPLALTTEAHRSIRRGPARLKPTTRPCWGIAYCVKGGPEKELKAMQYLERRECEYDQKISIDFYKEGDPLKPAVMGVLVFVSTPDPIGNKYYLGPAPLQNMARARELFYYLKGKQVDYGEEHSKACGHNRFGRIYHTGHYPVCYEHNPVHFVGHSAGAQVVRVLHQMLADKMRGAVVLAAKHAKTMVGKPLLYGIGTLLVMSLRTLYGVGCVFGARWFLYMTSVSPSLQIEFVYRKFFGGYCNCSYHVAQNTSLHEFLDSYLQFRHRCLVTVQRQMGHHHISRSYFRQTDIKRSGNASIDIMSKFFKLMVVGVLLCYFLIVEVVSMLYSLKNPYIIYFGTNLFNGGLD

SEQ ID NO: 3605 - protein, 260 aa, Zea mays
MATEYLSGWPLSSWISPGAAFFLFVNVLIGAIVVTSRGHQAGRGRAAASTRRLCRSASSMVLDRLRSFSMFSVHPDPTEMEERYSTSSPLELEAEEEQQPQPQPAVVEPARSPVAAVAAAADGASSEIAKEEAAEAGKDLPTSSNEAHGLLLQLQQGHGGRQQPPSSVHVVVTAADATAAVEIKEEEEKKAEQEATMQRAPASRRGTTEEAAEGKAALNARAESFIRKFREDLKLERLNSIINYTRTLRRGVGAPQPTAQ

SEQ ID NO: 3606 - protein, 1374 aa, Zea mays
MLKHVPDCGYCTAKKFEYEPPGFCCRGGKVELAPLETPPQLMRLWDSADSDARHFRDNIRFFNGHFSFTSLYCCLDSMTTNMRDSGIYTFRAQGMMYHNIKSFGSECGAEHKHLELYFYDDDPSLEHRYRKCREDQIQKDQEVIKQIVGILRGNPYSEHLRSMGHVENLADYHIALNLDQTLNQKTYNTPLTSEVAAVWIEGSERRGQFSKSVMLHGKDRSSHGIRSYHGCYDALSYPLFFPRGELGWHANIPKVGVSMGEVDAYRATHRASNGNDEDAEPPTHLCVSVRDYYCYKFQIRPGVFNPILHGKRLFQQFAVDTYIKIESSRLDFIRKNQDRLRADLYQGLVDSMLDGDVRGEKVGKRTVLSPSFIGGPRDMRRRYMDAMALVRKFGKPDIFLTMTCNPNWDEIKSELLPGQTPQDRPDLVVRVFHAKLQELKHRLTKQDILGKVRAYVYVVEFQKRGLPHAHFLLIMQRKYKLTCPEQYDLLISAEIPSNKYPELRKMVIKHMMHGPCGSLNPNCPCTKGRASCKHQYPRHFHEATMQGKDSYPNYRRRDDGRKEKVRGCELDNRWVVPYNPYLLRLFNCHINVQACGSIKAVKYLFKYIYKGHDRASVVMRDASKENGDVDEIQQYRDARWVTPPEALWRIYGFELSQNSPSVMQLQLHLPNMHMVTFHERQMVERVVNRPGADRSMITAYFEANKLYEEARGILYRDFPEWYTWQQGKVWQRRKRNTGGQVGRIVFALPSEGERFYLRLLLNHVTGATSYVDLRTVDGDTLPSFREAAQRRGLLEADNTIDECLNEAALYQMPSALRRLFATILVFCEPNDVAELWQRHLDTMSEDYHRITQSKRHLQQMVLIDIRNMLQSMGKDIKTFPLPAIIDRYDDSQGIDREIYEEEIIEATAEDVALQETLNEEQKSAYEKILSVVDTSNGGVFFVDGPGGTGKTYLYKALLAVLRSQDKIAVATATSGVAASIMPGGRTAHSRFKIPLTIDDGAICTFTKQSGTSKLLQKASLIIWDEASMAKRQSIEALDNSMRDIMGRPDLPFGGKTIVFGGDFRQVLPVVRKGSRAQIVAASLRSSYLWESMCHLKLVRNMRAKSDPWFAEYLLRVGGGTEEVNNDGDVRLLDEVCVPYTGDDRDLDRLIDDTYPSLNENMSNTSYITSRAILTTRNDWVDMINMRMIDRFQREQMMYHSFDTAVDDPNNYYPSEFLNTLTPNGLPPHVLKLKIGCPVMLLRNIDPANGLCNGTRLVHAGMRVFLPRIPLCPSDDEMFPFHFKRKQFPVRLSFAMTVNKSQGQTIPNVAVYLPEPVFSHGQLYVALSRATTRLNVKVLVIPVTDDKMNKGVEKKSTINGVTYTKNIVYKEVLTP

SEQ ID NO: 3607 - protein, 526 aa, Zea mays
MVTVAKIAMEWLQDPLSWVFLGTLALVVLQLRRRGKAPLPPGPKPLPIVGNMAMMDQLTHRGLAALAERYGGLLHLRLGRLHAFAVSTPEYAREVLQAQDGAFSNRPATIAIAYLTYDRADMAFAHYGPFWRQMRKLCVMKLFSRRRAETWVAVRDECAALVRAVASGGGGGGEAVNLGELIFNLTKNVTFRAAFGTRDGEDQEEFIAILQEFSKLFGAFNVVDFLPWLSWMDLQGINRRLRAARSALDRFIDKIIDEHVRRGKNPDDADADMVDDMLAFFAEAKPPKKGPAAAADGDDLHNTLRLTRDNIKAIIMDVMFGGTETVASAIEWAMAEMMHSPDDLRRLQQELADVVGLDRNVNESDLDKLPFLKCVIKETLRLHPPIPLLLHETAGDCVVGGYSVPRGSRVMVNVWAIGRHRASWKDADAFRPSRFTPEGEAAGLDFKGGCFEFLPFGSGRRSCPGTALGLYALELAVAQLAHGFNWSLPDGMKPSELDMGDVFGLTAPRATRLYAVPTPRLNCPLY

SEQ ID NO: 3608 - protein, 100 aa, Zea mays
MTRRLCADRRREARSDERDTAKGVAAAAARARTQTSEGAREEELGVCPSPMPRDGSGQTCRRRRSAWGELGLQEQQGEEVDCYWLREMVGKKEPELVPTG

SEQ ID NO: 3609 - protein, 829 aa, Zea mays
MVLATAERGGEEKVDHRPAAAAVVDVESGSLYSSSSSVVDRQDSLFREAVTGGHHRGAGGHSHDHDSWGTTLRLAFQCVGIMYGDLGTSPLYVYSTTFAHGGVGHPDDILGVLSLIIYSFLLFTVVKIVLVALHANDDGDGGTFALYSLISRYAEVSLLPNHQAEDELVSGYTCTSHGKPPSAALRRAHWLKHLLETSKSAKISLFLLTILAIAMVISDAVLTPPISVLSAVSGLKEKVPDLTTDQTVWITVAILVLLFAIQRFGTDKVGYSFAPIILLWLLLIGGVGLYNLVKYDAGVLRSFNPKYIVDYFRRNKKDGWVSLGDILLVFTGTEALFANLGYFSIKSIQFSFSLGLLPSVLLTYIGQAAYLRKHPEHFADTFFRSTPSALFWPTFILAIAASIIGSQAMISCAFATVSHLQTLSCFPRVRILHTSKRYHGQLYVPQVNLLLCVAACLVTVSFKTTTIIGKAHVNVYAEICVILVMLITTLLMTIVMLLVWRVNVWWIALFFVVFVPTESIYLSSVLYKFTHGPYVPVAMSAVLMAAMVVWHYVHVKRYKYELRHTLSPAKAEKLLAEKRDHLKSVPGVGLFYTELVQGVPPIFPHLVDKVPAIHSVLVFVSIKHLHVPHVDASERFLFRQVVEPREFRVFRCVARYGYRDSLGDEAQDFVAALLESLQCYVRDVNLYSVHEMQNVSYPVSRDQSLSREKPSGRHAVYAEEMITPIQSFSELSHGASSNRLPQFQQASKMNIEELARIEEEQMVIQREAEKGVVYILGETEVVARPQSSLIKKIAVNYIYSFLRKNFMQGEKMLSIPHGKLLKVGISYEI

SEQ ID NO: 3610 - protein, 383 aa, Zea mays
MATAFSLRAAAPATAPRAVSRSTSAARVVPMASALAGRGRLVARAAVTAKADVPSSTSDGHEVLLFEALREALMEEMELDPTVCVFGEDVGHYGGSYKVTKGLADTFGDLRVLDTPIAENSFTGMGVGAGMKGLRPVVEGMNMGFLLLAYNQISNNCGMLHYTSGGQFKIPLVIRGPGGVGRQLGAEHSQRLESYFQSIPGLQMVACSTPYNAKGLMKAAIRSENPVVLFEHVLLYNLKEKIPDEEYVLCLEEAEMVRPGEHVTILTYSRMRYHVMQAAKTLVNKGYDPEVIDIRSLKPFDLHTIGNSIKKTHRVLIVEECMRTGGIGASLRSAIVDNFWDYLDAPIMCLSSQDVPTPYAATLEDATVVQPAQIVAAVEQLCA

SEQ ID NO: 3611 - protein, 296 aa, Zea mays
MATSFFSEKEKLGEGGFGSVYRGYLKDLDLHVAIKRVSKSSKQGRKEYVSEVKITSRLRHRNLVQLIGWCHVGDELLLVYELMPNGSLDSHVHSTGNVLSWQRRHEIVLGIGSALLYLHQEWEQCVLHRDIKPSNVMLDASFNAKLGDFGLARLVDHERQSHTTALAGTMGYMDPECMFSGSASTSSDVYSFGVVVLEVATGRRPIVDTEEEHVTMHLVQWIWERYGQGRILDCKHTRSPTIVSPTTRQFARYLAPTTRDRGCRQFAVFVQPAVHRRTRVYIRIYYKWVQLSYCRP

SEQ ID NO: 3612 - protein, 324 aa, Zea mays
MMKPGERSRERDADFHYSGHDDEKDRYFFKVLVGDFRERLAVPDKFMQHFTRGLVTSSVTLESRCGRSFHVQVAENLGKVVLQAGWKEFVAAHGLSMGDVLVFKHDGTPRLKVFMFDHSCCEKVPPPCPVKIKREHHVCGGERRETHPEVPSSSCGDASMTFVTASSSSASPSDDASGEWILSPEDQKPRYVPGYILPNGTYLTCVQMQKLKERVRARTSTIPIYGCTVRKSNIRRGSQNMAIPRAYADVYLPFEDRTLTLQRCGESWEVQCRIQKGRRGCKRLAQGWRQFAHDNKLQLGDLCLFELLENTSKYTMDVHVVRAE

SEQ ID NO: 3613 - protein, 128 aa, Zea mays
MSCRRPSPSPAPLEPASSALISFPDAALSPSVLCWSASSPCPTFLAPWPPRLGSPAPLRRSAHLPAAALPWRVPASCFSSLCHLPWRPSPNAELPTRPRPWWLSSPSFLFYRSSSPIRRPHLKPVQPL

SEQ ID NO: 3614 - protein, 157 aa, Zea mays
MATATASVAPPSTSTSSVLLHRRLPSPAPAPASAAFPRLSGPAPPPRRARLLLRVALTNEVASDDVAAEEAAAAPKIGRRVRVTAPLRVYHVLKAPDLDIQGMEGVVKQYVCVWKGKRVTANFPFKVEFELAVEGQPKPVRFFAHLREDEFEFVDGE

SEQ ID NO: 3615 - protein, 672 aa, Zea mays
MLHHHGGAGSPYMAPTTADTGMDPFSPTPATRPAVSVTAIPPPPTMQLRPAGAGPSADFEELPAGGAGAGAAASLQDDDMQMQADYGASAAGASGSGGNRWPREETLALIRIRTEMDADFRNAPLKAPLWEDVARKLAGLGYHRSAKKCKEKFENVHKYYKRTKDAHAGRQDGKSYRFFSQLEALHAAAPQPQPPSGMTTVQAGPHHPMALAWTAGPTALGPAAGAGLPDLSFSSMSGSESEYDSDDDDDDDAGEEGLGRGEYHREMMAIFEGMMKQVTDKQDAMQRVFLETLERWEAERTAREEAWRRQEVARMNRERERLARERAAAASRDAALIAFLQCVGGGQGQPVRLPPHSAGASVVPAPPKPDCAPPSPRLDAAATSLQQLVPAQLKAVEALAWAGGEGGGSTSSRWPKEEVEALIQVRNEKDEQYHDAGGKGPLWEDIAAGMRRIGYNRSAKRCKEKWENINKYYKKVKESNKRRPEDSKTCPYFHQLDAMYRKKHRGDRGRITAAGPNMQDSPSQRELEGKSSNDVDIDNRKSDEQGNVHTSPVSGNRDTAPTTTRPPGDGAKNKTAEDNLKRTNVQLKQQQHEFGTDETDSDDDMARNHTAYTEEDDDEAKIKYKMDFQNPNMIGSSSNMSAPPPPAAAAATTAAAPTTSAAPTSNTFLAVQ

SEQ ID NO: 3616 - protein, 267 aa, Zea mays
MATKMVLCRFVALAAVACLLRPGAPVELHRKLSGWSDDAGATWYGAATGAGSDGGACGYQNAVDQPPFSSMIAAGSPSIFQNGKGCGACYQVKCTGHASCSGSPVTVVLTDECPGGACLDEPVHFDLSGTAFGAMAKDGQADQLRGAGHLKIQYTRVPCNWRGLDIAFKVDAGSNPNYFAVLIEYESGDGELESVELMQRGGGGGGAWAPMQQSWGAVWRYNSGDTLQAPFSVRLTSGSGRTVVASNVIPAGWTPGATYRSVVNFDN

SEQ ID NO: 3617 - protein, 296 aa, Zea mays
MAKSCTLLFGTVLVVLLLLVSPIACSRKLAKPTNKHRPRHKPAAVRARSNHTATPSVSDAYGSGGWLSAGATYYGAPDGDGSDGGACGYQTAVGQRPFSSMIAAGSPSLFKEGKGCGACYEVKCDSNAACSGKPATVVITDECPGGVCLAEAAHFDMSGTSMGAMAKPGMADRLRASGILKVQYKRVPCKYSGVNIAFRVDQGSNPFYFEVLVEFEDGDGDLSAVDLMEAGCGTWTPMVQNWGALWRYNSNSGKALSAPFSLRLTSDSGKVLVASNVIPASWKAGGTYRSLVNYYP

SEQ ID NO: 3618 - protein, 706 aa, Zea mays
MRAALFGAQRNGAADPIGGGKTLFWPEGKAKTLLEPWSVLDCTRSPSNSTSTLSSSLGSGAEDSTGVAVVSDRSAAAEATKWGAPGEHGGGGGKEDWAGGCELPPIPTGLDMGVVVADSWDAMLGNAAAAAQDQTFLNWFIGAAGDLDQSGPPLPVHHQPLLDNVGFGFPAADPLGFTLDPHLGGVASDMSSPGAVSQTTNSGGGGNKASSAFGLLSPESASFQPPPLPVLFHEGIDTKPPLDTQSPGLLHQYQHQPTPATTFLMSIPSFPSYNQQSPLVHPPAKRHQSIGGDLYLARTRLLPPPPTGQGHAFPPLNGPAPFQLQPSPPLPHGAMKRTAAEAAQQQLLDELAAAAKAAEAGNSIGARAILARLNHQLPPLGKPFLRSASYLKEALLALAEGHHGGCHLKSPLDVALKLAAYKTFSDHSPVLQFTNFTATQALLDEIGGSTSSCIHVIDFDLGVGGQWASFLQELAHCRGAGGAALPFVKLTAFVSAASHHPLELCLARDNIAQFAVDLGIPFEFSAISADMINPAEFISATDDEDVVVVLPTGCSARAPPLPAILGLVKQLAPKIVIAIDHGADRADLPFSQYFLNCFQSCMFLLDSLDAAGIDADSACKIEKFLIQPRIEDSVLGRGKVDNPIAWRSAFAAARFVPVPPSNWAEAEADCLLKRVQVHGFHVEKCGVGLTLYWQHGELVTVSAWRC

SEQ ID NO: 3619 - protein, 132 aa, Zea mays
MRRDAMPPPTAPSASSSSSSLFSGGEQLFESGPSTLVFLPLLLIQGGGMDLSRVGEKLLSSVRSVRSLGLLPPTPVAPPSRPEVPERAAAAAAAARGDRWVATSREDQPAIQFGGFGLHLWEKPPGLGRGGA

SEQ ID NO: 3620 - protein, 194 aa, Zea mays
MAEPRRTRPSTFRCAAATVLALLVVVVVIVLLWLFLHPSKLYFSVDHAGTTGFNFTAAGGLAGAFDLTLRASNPNERASVSYRWVDVGVWYNGTYLAGAHAPGFFQRPGDETRLDVVARAAPDAWVLPRGVEEGMKKERTAGKLAVDVHVVAKVRFRYGVVRTRKYTVRASCPAVPAEFVPPTSFDRVNCHVHI

SEQ ID NO: 3621 - protein, 188 aa, Zea mays
MEDYVAPEIIAGRGHDFTVDWWGLGVVLYEMLYGRTPFRGQSRRETFYRVLTKQPELVGEQTPLRDLIARLLEKDPEKRIGARGVKAHPFFCGVDWDRILQVARPPFIPTPPPQDEGEDGDEALDVEKVVCEVFASNDAEGGKAWPVADGGRVGGGDGDGMETGSLGDGDAVSFGIEMPEKRDLRGEL

SEQ ID NO: 3622 - protein, 214 aa, Zea mays
MLARPSAPPLVTAQTPEVGIFITARNVSGALVAKLPGNKNKCGGRSNVRQRNIQPGKRGCRREWRALSAADQAQASTLDVDEECKRVLTPLGFSSEDAEKMLKKAFGWTHSPYWSEEREKEVPTAEAVAGVLDYIRSLGLSDEDLGRLLKKFPEVLGCDLDGEVRPNVGKLDSDWGINGKTLRSLLLRNPKVLGYNVDCRGDCMAQCTRCWVRF

SEQ ID NO: 3623 - protein, 563 aa, Zea mays
MAEPALLPPDPFADLPFPEFQAPIDGDSFALEDFDLEDLDLDVDFDLDLFGSDGQPSQPPPLATSSSSAGSPVGGSSSSGAVGDGGGLRNEESSESSSRSASGTDGSGKGKGEEDEAKRRARQVRNRESAHLSRQRKKQYVEELEGKVKAMQATIADLSARISCVTAENAALKQQLGGAAGAAPPPMPMYPTMYSLPMPWMHPSYPMRGSQVPLVPIPRLKPPQPASAVAEPPAKKARKTKKVASVSLLGLICVAMLCGCLIPAVNRMYDSVDAGEGAAYGPSHRGRVLAVEGPHDNVSDGVDPKPPQRASETLPALLYLPKNGKHVKINGNLVIKSIVASEKASLQMSGNDGKRPQNQEEETRLAIPGYVTPLKAGEVMESTEGMMNNELLALAPADGSMYREEDGLLPQWFSEAMSGPLLSSGMCTEVFQFDVSPSSAHPNGIIPVYSNAMSNSSQNFTQDLPPARVRTVKNRRISYSEAIPLRGSTSNDTEHLKSFGSTKPVSSVVVSVLADPREAGDGDGEGRISSKSLSRILVVVLIDSVKYVTYSCVLPFKSHSPHL

SEQ ID NO: 3624 - protein, 428 aa, Zea mays
MMMMSSGRAGGGATAGRYPFTASQWQELEHQALIYKCLASGKPIPSYLMPPLRRILDSALATSPSLAYPPQPSLGWGCFGMGFTRKADEDPEPGRCRRTDGKKWRCSKEAYPDSKYCEKHMHRGKNRSRKPVEMSLATPAPAPAPAAATTATATSSPAPSYHRPAHDATPSPYHALYGGGGGGGGSPYSASARPGATGGGGAYHHAQHVSPFHLHLETTHPHPPPPYNYSADQRDYAYGHAAAKEVGEHAFFSDGAGERVDRQAAAGQWQFRQLGVETKPGPTPLFPVAGYGHGAASPYGVEMGKDDDEQEERRRQHCFVLGADLRLERPSSGHGHGHDHDDAAAAQKPLRPFFDEWPHQKGDKAGSWMGLDGETQLSMSIPMAATDLPVTSRFRNGGHCTSCSFVNLLLPRSSWLTRRSRSHPTFFS

SEQ ID NO: 3625 - protein, 384 aa, Zea mays
MADTDSAETEKEKMVADDGGKPAELSKSARKKLQKQERQAERKAARKAAEKERRRADIERRRREWEDALAAAPSDEARAEMVAARRETRRERVGRRAEERGARADRLRRAAEGAGQKVVLDLEFADLMRPNEIHSLTQQIMYCYAVNGRSANPAHLWLTGCSGEMATHLQRIPGYDKWIIERAARPYIEAFEDRKENLVYLTADAETVLDDLDMSKIYIIGGLVDRNRWKGITLKKSAEQGIQSAKLPIGNYLKMSSSQVLTVNQVFEIMLKFVETRDWKTAFFHVIPQRKRGEAETRDDVEKGGLDDNDGAAEGAADGDHSEEDLNKGFGEEEDDDGDEELEEEEADVSNKRQCVRVENGEAGDATVAEVEPNNGGGGGGGDR

SEQ ID NO: 3626 - protein, 376 aa, Zea mays
MMMMSGRAATAGRYPFTASQWQELEHQALIYKCLASGKPIPSYLMPPLRRILDSALATSPSLAAFPPQPSLGWGGCFGMGFSRKPADEDPEPGRCRRTDGKKWRCSKEAYPDSKYCEKHMHRGKNRSRKPVEMSLATPAPASSATSAAAAATSSSQAPSYHSPAPAVPYHAPYGAAYHHTQTQVTMSPFHLLHLETTHPHPPPPPPPPYYYADQRDYAYGKEVGERAFFSDGAGERDRQQQAAGQWQFKQLGTMEATKQPCTTPLLVPAAGYGHGAASPYGVGQAKEDEEEEETRRQQQHCFVLGADLRLAERPSGAHDAAAQKPLRHFIDEWPHEKGSNKAGSWMGGLDGETTQLSMSIPMAAAADLPVTSRYRT

SEQ ID NO: 3627 - protein, 729 aa, Zea mays
MSGWDEGAVFYSDQAQFPRGGPGGDPAADLTRHSALRKFKEFLRGFTGPTGDFPYRESLVHNRDHVTVAIEDLDAFDAELSDKIRKSPADYLPLFETAAAEVLASLRSKVAGETGEMEEPVTGDVQIFLSSKENCLSMRSVGADYMSKLVKIAGIAIAASRVKAKATHVTLICKNCRSVRTVPCRPGLGGAIVPRSCDHVPQPGEEPCPLDPWIAVPDKSKYVDLQTLKLQENPEDVPTGELPRNVLLSVDRHLVQTIVPGTRLTVVGIYSVYQASTTQKGAVGVKQPYIRVVGLEQSRDNNSNGPSNFTLDEEMEFKEFAQRPDAYAKLCSMIGPSIYGHSDVKKAIACLLFGGSKKRLPDGVRLRGDIHVLLLGDPSTAKSQFLKFVEKTAPIAVYTSGKGSSAAGLTASVTRDSSSREFYLEGGAMVLADGGVVCIDEFDKMRPEDRVAIHEAMEQQTISIAKAGITTVLNSRTSVLAAANPIAGRYDDLKTAQDNIDLQTTILSRFDLIFIVKDIRMYDQDKRIASHIIKVHASGAAASSTNTEGSEGENWLKRYIEYCRATCKPRLSEKAAEMLQNKYIEIRQKMRQQAHETGRAAAIPITVRQLEAIIRLSESLAKMRLTSVATPEHVEEAFRLFNVSTVDAARSGINEHLNLSPEIANEIKQAEAQIKRRMGIGSHISERRLIDDLNRMGMNESIVRRALLIMHQRDEVEYKRERHVIVRKA

SEQ ID NO: 3628 - protein, 595 aa, Zea mays
MVAAVASPSSAAPSAGRPHPTYKEMIMQALTELRDPSGSSRSAIATYIADHFSGLHSRHDALLSVHLRSLKSHGQLRLVSGNYFVSTAAQRQGRGSNIPPNPNPAPGQKRGRGRPRKYADSAPSASIPAFQDAKRGRGRPRKRKSAQDPVASSPSPSPLQGASVPPPPSGVKRGRGRPRKDALVPPPSSSSPLLGGIDPPPPSGIKTGRARPRKALVPVRSSFSELLGAVVLPPPSGVKRGRGRPRKSAYPAVAPLVGAEKGPAGGQPQRNTTPLSPTPATMSHSGKSETVRLPKVAVDISALRGSSMNISASSNSLVGAKRGRGRPPKVVVAGKEKMQPESVQSVDASLTKRGRGRPRKEKALESGRMKASQMTEGQREALTADQAGAVQNEVEDRDLQSLGTPLTEKRGRGRPRKRPLEIETAKAGAAKRGRPRKEKTSETGDLKVAQMTEGRHEALPAQAVDQTGPVQNEVEAMILQSLATTPLMEKRSRGRPRKRPLETETAETQVAASVEKRGRGRPRKKNPSAGWSAGTRDTALKGIKRGPGRPRKARPFETESVKTALEVSRDLTEDGPQKDGDLVSGKKADTHGVVW

SEQ ID NO: 3629 - protein, 96 aa, Zea mays
MASLSRTAAAAVVALRSAVRSAPLTGRVLGAPLPSFASPSATRSARILRRSAAAASAGLETLMPLHSAVAAARLRSCIAVDSSCWCSLSQGLNKRI

SEQ ID NO: 3630 - protein, 539 aa, Zea mays
MGVISTVLGFSGFGFGFSAGIVIGYFLFIYVQPTDVKDVKVRPLVEYDSKSLEGILPEIPLWVKNPDYDRIDWLNRFLELMWPYLNKAICRTAQDIAKPIIAENTAKYKIDSVEFESLTLGSLPPTFQGMKVYVTEEQELIMEPSLKWAANPNITVAVKAYGLKATIQIVDLQVFASPRITLKPLVPTFPCFAKILVSLMEKPHVDFGLKLLGADVMAIPGLYRFVQETIKKQVASMYLWPKTLEVPIMDPSKASKRPVGILLVKVVRAQNLRKKDLLGKSDPYVKLKMSDDKLPSKKTTVKRSNLNPEWGEDFKFVVTDPENQALEVNVFDWEQVGKHEKMGMNMIPLRELLPEGTKVTTLNLLKTMDPNDVQNEKSRGELTLELTYKPFKEEDIEKEDTQGADVIEKAPDGTPAGGGLLYVVVHEAQDLEGKHHTNPYAKIIFKGEEKKTKVIKKNRDPRWEDEFEFVCEEPPVNDKLHVEVISKAPKAGLIHGKETLGYIDISLADVISNKRINEKYHLIDSKNGQIQIELQWRTS

SEQ ID NO: 3631 - protein, 299 aa, Zea mays
MGGRRPTYTTRARSAAAALRPAAGMGRQPCCDKLGVKRGPWTAEEDRKLINFILTNGHCCWRAVPKLAGLLRCGKSCRLRWTNYLRPDLKRGLLTDAEEQVVIDLHAKLGNRWSKIAAKLPGRTDNEIKNHWNTHIKKKLIKMGIDPVTHEPLDRKTTSSGPATTSQSTKSDEATKEQSPQNDDAVIRDVPADGCSPTESSTNTVSTGGSSSSGGGGHDQDPLVKWLLEEEPATGDEAWLNFTGSVDVDEFSSIAAGPELLPWDGATDWLLDYQDFGLGDSSLVDGYMVNNNSSNGAKF

SEQ ID NO: 3632 - protein, 421 aa, Zea mays
MPARARWRLLALPLALLLVAGSAHGLVKPEAAAAPKPPVPKAISDLRDAIVKGLGFQAEGLKVSGFDVRDALVGHAVAYEFDIEVGRKVLPVRLLEDVSRWDFVDLPIFRSQADADDTALAEIRRTGTGSIVEPTLPPFQLAGPMELWIQNGDDVRLALPHDVDAGTLKKVVLSDGAVVTVKGARAVSLRLPLELPLPLNRTTYKGRLSSLISIAQALRGAARSNQKPLLSLRVEGPVSLSSTPSMSPKDKLKLKRLAPGQVELSSQAGAIPAITEDEDEPHNPGLWPLLSLNGSDGSLQGFEELLASVLGKKAGEKGTFKLLKARASAQTYVKMAFTVEKKLAEGDVNWSNIPEWKTKPKRMRAHYEVLARVEEGQAIPERIAQVQPFQANEAMSESVLTGNVTRSKMEIVHPPPVYFTL

SEQ ID NO: 3633 - protein, 287 aa, Zea mays
MLLSNVLWKIPDRAISHDTSPLTIYATSSISNNVKTVLGSGTQYANGFAVADIERSSLILCGKAFADSAIVKDALTAMTAPILSARGGLPVPGWILNFGGSTVLLFAPVEIMMSCVEIHNALLSIDCGAVISSKGSTVLFPTKASREQKLLTKPTAVIIVSSDSSGAIPSVCKLSPGQAAYHFLAGYHDGKFVPAYNRAPSPADPLALASSLFSHLKEDDTPSYLINAKHSGKYIDGNGFMKLLKLALSHDLPDIKTEGSRVGELKGKYRSFLSSKFGQCLPEEFSF

SEQ ID NO: 3634 - protein, 289 aa, Zea mays
MDRRPALAVSPRPPRVPRPPLVPASSVQTPPGSMKKAAAPMRASVCAIPSPVRFEPSPMRASISALPSPIRAEPSPMRARVTAALQPPSRVKLDLAASSPPPARAAADKENFLLAAAPSSPSARVGFDKENLLPAGADAHDELVALNLAAIARTAGTPSGGPLFVRGRLYDLYSARRNERLKRKQDFPFYSEEFASAAVDPETMAENPCVAVELSKRRVAKKAYAASGAESVRRSMPAVDFAACRGGDLGPRSSLRSSKEMKKASAASGAVSMATKVRRVNPRSSVRRF

SEQ ID NO: 3635 - protein, 166 aa, Zea mays
MPRSPSQGGSFLLSEAFSLCAAGKLCAFALSSSSRLYAFHTALDVRGDPPPPPPPPPLAPPVHHPSSPIAAFPPQLEDGGPTAPNLLLAGLAAQPCSSTSDGSPALSSIILLLLLHLWASSVGRRLHMEDAANESSNNSRPCSPPGTPMQQASCVVLLSPAAAREP

SEQ ID NO: 3636 - protein, 265 aa, Zea mays
MDAQQQLDLVMRHQSMATVCESEDALGSSESDPARPARPRGKRSRAAEVHNLSEKRRRSRINEKMKALQTLIPNSSKTDKASMLDDAIEYLKHLQLQVQMLSMRNGLYLPPGNLSGAPETLAPLEMCAALNQSGAKASNSGVVVLPGNKIPVARLLLDPPNHDQRHENPLVLQSVPSSSTAVEPRFLQQPAQPNLQSFQLAVPPEMIFDEADMMLKHRLASGRETTSLPVGHEAKPGRQEACMVNSDISNRGSLGKEVFMPYLHR

SEQ ID NO: 3637 - protein, 331 aa, Zea mays
MAAASRGLLARLRVLSLSGGGSPWLRFPPSRLFSAEAFVSHSDDDDAGGEGGGGGRIIEARSGVMGPTSRRTGVIGVKCGMSAMWDKWGAKVPITVLWVDDNVVTQVKTAEKEGFFALQLGAGQKKEKHLTKPEVGHFRAQGVPLKRKLREFPVTEDALLPVGTSITVRHFVPGQFVDVTGITKGKGFAGVMKRYGFGGMPASHGTSLAHRSGGSTGQRDAPGRVFKNRKMPGRMGGVQRTVKNVWVYQIDPARNLLYLKGQVTLFLMSQQILLKHRSCVLCIFRCPFCRFLVLKVALFSLRILYIRNLTRLCSHFLHTSRVKVSLKTWSP

SEQ ID NO: 3638 - protein, 534 aa, Zea mays
MAAMAAAGGVGLHLIGAATATLIVAVLVAAVLGRRRRARARAQAPPVEGKPAPEAGCAVGDGAGPDVGTDVIIVGAGVAGSALAYTLGKDGRRVHVIERDLTEPDRIVGELLQPGGYLKLIELGLQDCVEEIDAQRVLGYALFKDGRNTKLAYPLEKFHSDVAGRSFHNGRFIQRMRQKAASLPNVQLEQGTVTSLLEENGTVKGVQYKTKSGEELKAYAPLTIVCDGCFSNLRRALCSPKVDVPSCFIGLVLENCQLPHPNHGHVILANPSPILFYPISSTEVRCLVDVPGQKVPSIASGEMANYLKTVVAPQIPPEIYDSFIAAIDKGSIRTMPNRSMPAAPLPTPGALLMGDAFNMRHPLTGGGMTVALSDIVVLRNLLKPLRNLHDASSLCKYLESFYTLRKPVASTINTLAGALYKVFSASPDQARNEMRQACFDYLSLGGVFSNGPIALLSGLNPRPLSLVAHFFAVAIYGVGRLMLPLPSPKRMWIGARLISGACGIILPIIKAEGVRQMFFPATVPAYYRAAPTGE

SEQ ID NO: 3639 - protein, 145 aa, Zea mays
MTMAQRTMCLLRRSIGFTGPQAQRALSTTAAPAAEGAAVAEATAKEAKRRRKNLFDVVQFLPEWGIGYKVAKTTWRDVSYQITKINLYKDGRHGKAWGLRYKAGVQAADTPTRISGVNKRGWKYIKESQKKLQEAPKVDVAVAAA

SEQ ID NO: 3640 - protein, 1108 aa, Zea mays
MVRKKRTGPGESSGESSGAPGHGSSQRPQATQQGTRGGGQHQGRGGYLGPGVPPSQHPGGGPPEYHQPLDYQGRGGYQGRGGPPSQHPGGGTPPGSQPRGYQGHGGYQGRGGPPSQYPGGGTPPGSQPRDYHGRGGPRPRGGMPQSYRGGHVGGSVIPSVPSGPSRPVPELHQAPDVQHQAPVVATPSSPGAGSSSQPGKAEVSTGQVQQQFQQLAIHNQSSASQASQIAPASSKSVRFPLRPGKGTHGSRCIGKANHFFAELPNKDLHQYDVSITPEVTSRGVNRAVMAELVKLYRHSHLDGRLPAYDGRKSLYTAGALPFASKTFEITLQDEEDSLGGGQRRQRVFRVTIKFAARADLHHLAMFLAGRQPDAPQEALQVLDIVLREMPTAKYCPVGRSFYSPKLGRPQQLGEGLETWRGFYQSIRPTQMGLSLNIDMSSTAFFEALPVIDFVSQLLNRDISVRPLSDSDRVKIKKALRGVKVEVTHRGNMRRKYRISGLTPQATRELSFPIDDRGTVKTVVQYFLETYGFSIQHTTLPCLQVGNQQRPNYLPMEVCKIVEGQRYSKRLNDKQITALLKVTCQRPQAREKDILETVYHNAYSKDPYAQEFGITIDERLASVEARVLPPPRLKYHDSGRERDVLPKIGQWNMMNKKMVNGGRVSSWACINFSRNVQDGAAGSFCHELALMCQVSGMDFVLEPVLSPCYARPELVERALKGRYQDAMNILGPQGRELDLLIVILPDNNGSLYGDVKRICETNLGLVSQCCLTKHVFKVNKQQYLANVALKINVKVGGRNTVLVDALARRIPLVSDIATIIFGADVTHPHPGEDSSPSIAAVVASQDWPEVTKYAGLVSAQAHRQELIQDLFKVWQDPERGTVSGGMIRELLISFWRATGQKPKRIIFYRDGVSEGQFYQVLLYELDAIRKACASLESDYQPPVTFVVVQKRHHTRLFANNHNDNRAVDKSGNILPGTVVDSKICHPTEFDFYLCSHAGIQGTSRPAHYHVLWDENNFTADGLQTLTNNLCYTYARCTRSVSIVPPAYYAHLAAFRARFYMEPDTSDSGSMASRGPPPGGRNTKAAGVGNVAVRPLPALKENVKRVMFYC

SEQ ID NO: 3641 - protein, 589 aa, Zea mays
MRVGGGRDDDDEVSRKLKSMDVDKLENGGGEESPRPAVKYHGWKAMPFIIGNETFEKLGTLGTSANLLVYLTQVFHMRSVDAATLLNGLNGTTSLAPIIGAFLSDAYLGRYLALAIASVASLIGMFLLTMTAGANSLHPPECSVGETCEKATSYQFAVLFVAFAFLVLGSAGIRPCSMPFGADQFDPNTESGKRGINSFFNWYYFTFTAAMMISATVIIYVQSNVSWPIGLGIPTALMFLACVLFFMGTRLYVRVTPEGSPFTSVVQVLSAALKKRSLKQPKDPKQDLFDPPHTSAIVTKLAHTDQFRCLDKAAIVASPDEVRSGGGAPADPWRLCSVQQVEEVKCLIRIVPVWSTGIIYYVAVVQQSTYVVLSALQSDRHLGRAGFQIPAASFTVFAMLAQTLWIPFYDRLLLPKLRKITGKEEGFTLLQRQGIGIALSTVAMVISAIVEDRRRAIALSQPTLGTTITGGAISAMSSLWMVPQLMILGLSEAFNLISQIEFYYKEIPEHMRSVAGALAFCNLALGNYLSGFLVTIVHRTTGSGQNWLAQDLNKGRLDLFYWTIAGIGVFNFIYFVICARWYRFKGASN

SEQ ID NO: 3642 - protein, 199 aa, Zea mays
MEALLVTVLLLLLSSTLAAAQWCVCRQDASQAALQKTIDYACGSGADCNSIHETGACYNPNTVPAHCSWAANSYYQNNKAKGATCDFAGTATLTTSDPSSSGCSYPTTSASAAGTVTPTTGGTMGGAGGPGTLTPAGTGAGTAGTTGMGTAGTTGTGFGGLGPAGMDTAAAAAGGLLLLPEAGLCAALVALLLSAIVLA

SEQ ID NO: 3643 - protein, 921 aa, Zea mays
MPQQAVLVGLTAGMVAAEGKAAGNKTMMQKQQASSCCSDRDQDMADLELALEAVVPVSVQRQDSLYRDATRAGGGGQQQHEGWARTLRLAFQCVGVLYGDIGTSPLYVYSSTFAGGIRDTDDLLGVLSLIIYSFLLFTIIKYVYIALRANDDGDGGTLALYSLISRHAKVSLVPNHQPEDELQTTDAAAAVLGKHGSVRRRTVQLAASHGREQRAVWVKELLETSKPVRISLFFLTIVATAMVISDACLTPAISVLSAVGGLKEKAPNLTTGTAGARPRVRTPDRVDHCGHPGASVRRAALRHPQGGLPVRPRLLLWLLLIGGVGVYNLLRHDVTVLRAFNPKYILDYFRRNGRDAWVSLGGVLLCFTGTEALFADLGYFSIRSIQLSFGFGLVPAVLLAYIGQAAFLRRYPEQVSNAFYQSTPESIFWPTFVLALAASVIGSQAMISCAFATISHSQALGCFPRVKVLHTSRQYRGQLYIPEVNLLLALVACVVTLASKTTAVIAEAHGICVVLVMLITTLLLTLVMLLVWRVNAACVALFFAVFAAAESVYLSSVLYRFAHGGYIPVAMSAVLVAVMVLWHYVHVKRYKYELERTVSHESVVRDLLPRCRTVPGVGLFYTDLVQGIPPVFPHLVDKIPSIHAVLLFVSVKHLPVPHVDATERFLFRQVASSSESDTAAGPRVFRCVARYGYRDLLEEASDFAGSLVERLQYYIRDVNLYGVEHQQPGAKVSYPSSRCDSMILMARQRSSVMMLRQSSAASYYSSYAAAAETQQLQLARARSTSGAGGILLHSASERAEQLARARSTGIFAEEMLTPAESFSELSRMGSIGGGGMQAVKISLEEMARIEEEQRFIEREMEKGVVYILGESEVVARPHSSLLKKLLVNYAYAFLRNNCRQGEKMLAIPKSQLLKVGMSYEI

SEQ ID NO: 3644 - protein, 644 aa, Zea mays
MDTTTQGLEFGGGINSPKPYCYWSTTQDTTVHKDSTPEAYSTFSISNSKASKRKQGAMSGAKGGNPLLTLGLGCSPSSSYNSKLSSGTACITSSSLLKEIDEESSIDLGLNLGLYIGNDIGHCQQKSHAGFENVLSTNSPKLDLQLSLSTSSPESVVIDANRSPDGLAMPMANSPLAIVEEGSVPHSWVFEHSIVSSSHASKATHGFPLSKKTNGGNASVPSHVMSSTMFTSVKGPVASASETTNSQQRNSNAKSCQFPGCVKGARGASGRCIAHGGGRRCQKPGCEKGAEGRTIYCKAHGGGRRCQFLGCTKSAEGRTDHCIAHGGGRRCSHEGCSRAARGKSGLCIKHGGGKRCQKENCTKSAEGHSGLCIAHGGGRRCQFPDCTKGAQGSTKFCKAHGGGKRCTFVGCTRGAEGSTSFCKGHGGGKRCAFQGGGVCPKSVHGGTQYCVAHGGGKRCASFGCTKSARGRTEYCVRHGGGKRCKFESCTKSAQGSTDFCKAHGGGTRCLWGQADTSFGAGAQQCDKFVRSKTGLCSAHSALIQDHCVHGGGTLGSAIYQSVHVKPTEMINGDKTLLDPAIPVTNSGVHPPVLAQSMIDPLPEGRVHGGGLLALLSRGGSRTSAGGSELCFGQDRVDLRLSGSP

SEQ ID NO: 3645 - protein, 535 aa, Zea mays
MDRLPESTRSMRKYASEAGGLRAARQGPHGRSLTARTAHSMSTTALRTKSKSAASLLRRVPFAPLRPVLANLQEVFLGTKLAVLFPAVPLAIAAQCAHFGQVIDQSIPYSSHIDPLDQNRPAACGALLLAFIRPILHAVGSLCSLRTTCDPFVLKPGRNLNWNCLAHSLSLAWQVWVFSLSLLGLIPLAERVSFLTEQIAIYTGPTVGGLLNATCGNATELIIALFALMEGQIEVVKCSLLGSVLSNLLLVLGTSLFCGGVVNLGSDQPYDRTQADVSTGLLILGVLCQSLPLMLRYAVGAGEHSVAAATTVLDLSRACSVVMLLAYVAYLFFQLKTHAQLFEPQEVDDGCEAEEDEQAVIGFASGLFWLAFNTVLIAILSEYVVGTIEPTSKSWGLSVSFISIILLPIVGNAAEHAGAIIFALKNKLDITLGVALGSATQISMFVVPLSVIVAWIAGIQMDLDFKLIETGSLFVSVIVTAFTLQDGSSHYLKGILLLLCYIVIGACFFVTRQPASNNNGAGLSLPTGTLSAQAA

SEQ ID NO: 3646 - protein, 1281 aa, Zea mays
MPAAAPTTPRRHPSPNAGGRASSPTPAGSQAKRSQSTERRPVTPSRPSSGGSRPSTPSRISAPASPSSATSSPSSFSSSSTPVGDAVPETQIALRRLPGGRAPDGLWPSMRSLSSSFQLESKGKKISSSSSADQAKTRDAAPADRKRSPLRGRATPEQSENPHAKVIDHHRWPAMMGGRVSASTMSKSMDLTDKISRSALPSVPSRGVSPKRTTVSSAANTLSRSIDLADKIDRLVSSSMSSQGESPRKSPCNGADDVSKKVGVRKDLKLSSLAISRRVSPVTTDDKIDRLVSSSMSSQGGSPRKSPCNGADDVSKKVGVRKDLKLSSLAISRRVSPITTAASDGTRTLSGSMDLTEKDNSTLSPVSSPSISPSASLSSVSNAASQTTTKSSERLIGPVSNLSSSRGLSPRRTTSGGIVDLMKSIDFPEKDRRPASSRGFSPRRRLVSDGVNDIGKNMDFAEKDSRVVSSSIPSRGVSPRRRLASDGVDTMCRSSEFSGKDNRPSTSSSTSRGMSPRRRLASDGISAVTKGMDFGDNANRPSTSKGVSRGISPRLQLASDGVGNVSKGTDLADGLDRPSTSYATPRAAARGVSPRRRLASDGVKVTSKSIDLVENSNKPLTVSAATRGASPRRRLTSDGLAFISKSTNITEKSIRPSTPSMSSRGMSPRRRLASDGINAVLDTEFADKNCRPSSSSAALRGVSPRSRSASNAISTGMTNAENDSRPSTTSSPSCQTLQSSRLESNGVNILSKDMEISSTVSGCTSDSRLDGAGALVKSIDVTEKLTVSTEDGGGEDDPGRIDSSDVVTSAVSSSLASQEVSSRHVTDDVKNASESVGATQKGNRPLSVKVPSRVASPRRRLASDGIDTISKSMDFAEKDKKPMTVSVPSRGMSPRRTARSDSADIMSKSMDFPLQVFSTRRVLGPDGANAMSRSMDLTDKIRQKISSTMQSSRVSPRKMPLAYNRIKGPEILSGDAESPGSADGNESQEENASSSPDAPSNSSEKSTPPKQLARRSPSPSHILICPSSSSNASSTPSFVSRRLPSPSRTRPSTPVSPCSSARSDSASSILSYIGDATRGKKSPTHTEDAHQLRLLHNRNLQWCFTTSYVDELLSIQKISAETMLYSVWDANSRMCDSMVIKRNYVQQLRQEVKLGIVLKEQMDYLDHWAALQTEHSSSLSSATEALKASTLRLPVSGGAKADVLTVKNAVSSAVDIMQAMGSSVCHLLSKLQASHSLVTELSAVAAKESTLLNEYRELLATAAALQVQESSLRTQLIQETE

SEQ ID NO: 3647 - protein, 389 aa, Zea mays
MQPSGREMQGGGGAQDDFFDQMLSTLPAAWSDLGSGKSPWELPAAAGAVTEDTAALDEPALLASRLRHHQIGGGEKPLMLHLSDLHGLGAGAGDDAGFMPLPLFTQHLARDDVDAAFKSPNAAGGDRELYNGFGAAGNMHTAAVHQPPPFGQGGSMPAAPQSFGGGGPAPAAGAASGGGAPPRQQRQRAKRGQATDPHSIAERLRRERIAERMKALQELVPNANKTDKASMLDEIIDYVKFLQLQVKVLSMSRLGGATAVGTLVAGIASEGNGSGDGTSDSGKGNAANGENGGGGSLQVTEQQVARLMEEDMGTAMQYLQGKGLCLMPISLASAISSATWPSLLSRPSMGAMGDARGPLHDGGSPASPPLVNCGDDSSTVKDAGAGGKR

SEQ ID NO: 3648 - protein, 284 aa, Zea mays
MILSVLKKTQRPVKFWFIKNYLSPQFKDVIPHMAREYEFEYELVTYKWPTWLHKQKEKQRIIWAYKILFLDVIFPLSLRKVIFVDADQIVRADMGELYDMNLKGRPLAYTPFCDNNKDMDGFRFWKQGFWKDHLRGRPYHISALYVVDLAKFRQTASGDTLRVFYEQLSKDPNSLSNLDQDLPNYAQHTVPIFSLPQEWLWCESWCGNATKARAKTIDLCNNPMTKEPKLQGARRIVPEWTGLDSEARQFTARILGDDVEPADATPPPSEAPKPEDDQDVKDEL

SEQ ID NO: 3649 - protein, 515 aa, Zea mays
MLLHLLPLSCPAPPFHLRRTGGSPRTPRVRAGDRTRTRGFRGTDVEPETAPRRRRGRDGDDPQAAGSGGDTGALLASVRRLLLSEAPAAAEGDSEEEEQGQFPKRWAIVFLCFSAFLLCNMDRVNMSIAILPMSAEFGWNPQTVGLIQSSFFWGYLLTQIAGGIWADTVGGKTVLGFGVVWWSIATALTPVAAHLGLPFLLVVRAFMGIGEGVAMPAMNNILSKWVPVSERSRSLSLVYSGMYLGSVTGLAFSPLLIHKFGWPSVFFSFGSLGLVWFTTWATKAYSSPLEDPGISAAEKKLIASQSTAGEPVKTIPWRLILSKPPVWALIVSHFCHNWGTFILLTWMPTYYNQVLKFNLMESGLICVLPWFTMAVSANVGGWIADTLVSRGVSVTTVRKIMQSIGFLGPAFFLTQLSHVNSPAMAVLCMACSQGTDAFSQSGLYSNHQDIGPRYAGVLLGLSNTAGVLAGVFGTAATGYILQHGSWDNVFELSVVLYLVGTLVWNVFSTGEKILD

SEQ ID NO: 3650 - protein, 580 aa, Zea mays
MGEVEDMYTQDGTVDMKGNPAVKKGTGNWRACPYILANECCERLAYYGMSTNLVNYMKTRLGQVNSVASNNVTNWQGTCYITPLIGAFFADAYMGRFWTIAIFMIIYIFGLALLTMASSVKGLVPTSCGDKDVCHPTDAQAAVVFVALYLIALGTGGIKPCVSSFGADQFDENDEREKKSKSSFFNWFYFSINIGALVASTVLVYVQTHVGWGWGFGIPAVVMAIAVGSFFVGTPLYRHQKPGGSPLTRIAQVLVACARKWNVAVPADKSRLHETVDGESVIEGSRKLEHSEQLACLDRAAVVTAEDGAEASPWRLCSVTQVEELKSVIRLLPIWASGIVFAAVYSQMSTMFVLQGNTLDQSMGPRFKIPSATLSMVDTISVIVWVPVYDRAIVPLVRSYTGRPRGFTQLQRMGIGLVVSIFSMVAAGVLDIVRLRAIARHGLYGEDDIVPISIFWQIPQYFIIGCAEVFTFVGQLEFFYDQAPDAMRSMCSALSLTTVALGNYLSTVLVTIVTHITTRHGRIGWIPENLNRGHLDYFFWLLAVLSLLNFLAYLVIASWYKYKKTADDYPGAKGEHGTEH

SEQ ID NO: 3651 - protein, 587 aa, Zea mays
MPTASSAHRSLLLCLCLALLSNPVAASPSPRGLRFSAKDIAAVEAALPRHGSRASSSSKTTFFEVDRPLRPPRGSSGPCSTLLLSHSFAFTLTKPPVTAAYSPPPCLSGSDAPPVSLAVLEWRAECRGAQYDRTFGVWLGGAELLRGSTAEPRPGGVVWSVSKDVTRYAALLAAGNATLAVYLGNLIDDTYDGVYHANLTLHLYFRRGVRPSAAAAAADAVVPVSRSLPLNDGLWFVVQNDTDVQSARVSVPRNAYRAVLEVYVSSHDADEFWYMNTPEQNGPFREVTVLLDGAVVGAVWPFPVIYTGGINPLIWRPITSIGSFNMPTYDIELTPFLGSLLDGEEHELGFAVTNAQRSWYVDANLHLWLDPKSSRTSGGLVAYHAPKLAGSIVSRSADGVDGEYAATASRNITATGWVSSSRGNVTTTFAQRLSFSNTNVVSGQGSAQAINQTTDALTAVSGGPAPAQVHQSFPLYIFLGGDGSGTSSQRLMRRVEIGFDETRSRGGGGAGGEGAASTTTSTLRNSQVAAAEVTLRDDAVVGASWRMHQTYEYGASDGGCYLRNVSSVGYDVLFDHRDASCAGTLGR

SEQ ID NO: 3652 - protein, 288 aa, Zea mays
MASRDFLRVFGAGEGAGPPGDAGAGQPDDDELSLGLSLGGRFGTDAKRPRLARSSSIASVCSVSSLHADPSPAAPLPLLRTTSLPTETEEERWRRREMQSRRRLEARRKRVERRNSMGSVSVAPADAVSGRRSNASQGSNSASTTEQGIGGSMFNQSADAKSPSTSDNRNQNDMLPPTKAAEKPLNGTATEQQPRLRTLGSLTTRTGSTSDIRKLMMEDMPMVSSKVEGPNARRIDGFLYRYKKGEDVRIVCVCHGSFLTPAEFVKHAGGGDVPNPLRHIVVNPAPFS

SEQ ID NO: 3653 - protein, 375 aa, Zea mays
MDAAAHWQQSLGLVKPLEEMLMAASAGAANPSQGSNPNPPPLAAPLTDAGSTERRARPQKEKALNCPRCNSTNTKFCYYNNYSLQQPRYFCKTCRRYWTEGGSLRSVPVGGGSRKNKRSSSSSSSSSSSAAAASASTSSSATSSSMASTPGAASKSPELAHEGAHDDLNLAFPHHGGLHAAEFAAFPSLESSNDMCDQGGGMTSNGRGGGAGPAVGALSATELLRSSGCYMPLQMPGGDYTAAGFALGEFRTPLLPPPSSQSPLGFSLDAHGPGSSGAAAAAGYGSSAGLPQGVPGNAGRLLFPFEDLKPPVSPGGGGVGGGGASATGGAGDGNSSHDQFDHNKERGGGGGRGAGAGHDTPGFWSSMIGGSGASW

SEQ ID NO: 3654 - protein, 493 aa, Zea mays
MDQPPNGFAAGGFFTHIDGQNRSPPSVIVIGGGISGIAAARALSTASFKVTLLESRDRPGGRVHTDYSFGCPIDMGASWLHGVCNENSLAPLIRMLGLRLYRTSGDNSVLYDHDLESYALFDKHGQQVPQEIVSKVGETFERILKETVIVRDEHANDMPLFQAIAIVLDRNPHMKLQGLEYEVLQWCICRLEAWFATDMDNISLKTWDQEHVLTGGHGLMVNGYDPVIRALAQGLDIHLNHRVTKIIQRYNKVIVCVEDGASFVADAAIVTVPLGVLKANIIKFEPELPKEKLSAIADLGVGIENKIALKFDTVFWPDVEVIGRVAPTSNACGYFLNLNKATGNPVLVCMVAGRFAYEIEKLSDEESVNFVMSQLRNMLPQATDPVQYLVSRWGSDPNSLGSYSCDLVGKPADLYERFCAPVGSLFFAGEAACIDHSGSVHGAYSSGIAAAEDCRRRLSAQLGISAGLFQVGKAAMREEMTAEAMVPFQISRL

SEQ ID NO: 3655 - protein, 145 aa, Zea mays
MMRPGAESFPTTSHGAPMAAPNSPWQSPVPYLFGGLAAMLGLIALALLILACSYWKLSGYLDAGRDQRAAGEAGGAGAGADGEKGSATGAARPAAGVREHVVVIMAGEDWPTFLATPAASRAVAELGADAGTVSRSSASAMALAE

SEQ ID NO: 3656 - protein, 242 aa, Zea mays
MEEDGGGGARHVERWEGYVDWRNRPATRGRHGGMAAASFVLVVEVLENLAFLATASNLVTYLMGSMGYSPSQSATAVTSFMGTAFLLALLGGFLSDAFLTTYTVYIASAFVELTGLVILTVQARTPSLMPPRCASPGAGGAACHPVSGAKDAVLFLGLSVTALGLGRDHGFLLFPGAESFFLSFASWVSRFPSPFFSLLILLPSPSLLFFYLHLFWVAFQSNFFYAYRRIYLSSPLPPLFFF

SEQ ID NO: 3657 - protein, 168 aa, Zea mays
MASQGSSVFAALELAPEDPILGVTVVYNKDPSPVKVNLGVGAYRTEEGKPLELNEDRRAEQMLINNPSRVKEDLPITGLAEFNKLSAKLIFGADSPAIQENRVATVQCLSGTGSLKVGGEFLARHYHERTIYIPQPTWGNHPKVFTLSGLNRWQLRLYESATCCLYFS

SEQ ID NO: 3658 - protein, 225 aa, Zea mays
MDPSGPAGPSSAAGSGDDALAPPQHQVQPLPQAQPQPQQAAPPPQLSRYESQKRRDWNTFLQYLRNHRPPLTLARCSGAHVIEFLKYLDQFGKTKVHAAGCAYYGQPNPPAPCPCPLRQAWGSLDALIGRLRAAYEESGGTPESNPFAARAVRIYLREVRDSQAKARGIPYEKKKRKRTQQAAAEASTSSSAAAAAGGSGSGSGRAAAASSAAQAGGSSAAPSTT

SEQ ID NO: 3659 - protein, 552 aa, Zea mays
MDHHLTPTPPPPPPPMGNSAAGASSKPPTPASTPNSRLASAPSSRHAATPPHASAAASAPAPASRTVYSDRFIPSRTGSNLALFDLAPSPSSAASSSHSHDAGPAASSGSAQPAASPYCTLLRAALFGPDTPDRVASSAAACSSSSSSFSPGPSPVGTPATGNIFRFKTEVRRNAKRALFSGDQEEDALFPGIFTTRGAGPRKVPRSPYKVLDAPALQDDFYLNLVDWSSHNVLAVGLGNCVYLWNACSSKVTKLCDLGVDDNVCSVGWAQRGTHLAVGTKQGKVQIWDATRCKRIRTMESHRMRVGALAWSSSLLSSGSRDKSILHHDIRAQEDYVSKLTGHKSEVCGLKWSYDNRQLASGGNDNGLFVWNPHSVQPVLKYTEHTAAVKAIAWSPHLHGLLASGGGTADRCIRFWNTTTNTHLSCVDTGSQVCNLAWSKNVNELVSTHGYSQNQIIVWRYPTMSKLATLTGHTYRVLYLAISPDGQTIVTGAGDETLRFWNVFPSPKSQVRKSTWKTRFRCVWLFGFSCGNPSHVSFLSLVHPLSCRALIV

SEQ ID NO: 3660 - protein, 237 aa, Zea mays
MAGATPGRSASRARASARSQPKSRHPRAPPRRAPDRIRQGLRASVVPAARSRCRARVEPGSAASGLRAQEAERPCPPGLPSACTPPGRGSSPRQAAPSACALPGRSGSDRAEDPRWGSRSRPAARGRSGIPLSLRALGRRGPRCHGLGPPWPASAPLETHARGRRSSADRPGPHPRAARPGPRCACARVRLAGAAPVPAVRQGRLFPWLSKVAKSRLYECMVKTMEISPCLPLSNPT

SEQ ID NO: 3661 - protein, 562 aa, Zea mays
MQIDALHCHHRSTSLSLSPFRSEEGSTTGPAEMSGKGKRRSARLLKLEEQKNDGGAVCFLDPWQIIRNSISGPSARGKRKRNEGIQPQGEASCSRQEPLYAGNSNSLPSQTSVGQIIEYILDELEMRDRHELFAMPDDIQVTDYAELVSRPGDFATLRQKNRDGMYTALEQFENDVYMVFQKAITMNSQDTVPFREGMALLDQAKLVFMSLRSNQMFSESELAAWRQRHADQMQQPITPEGREGGGRGPPRHTAAAPLLQPSAATPRKRSAAETKKQEDARTGGNATGNQRGRPRGARETKATAPTPPGKRARKATAGFNGGRGLVARRRLTYNDEAAADQGWREIAATPVFQGRHVTLRDQPQEQTFRGSLQRFVRHAGLKARVAAEFRSLECVARARHCPVPQCWNGFAPSAGFLPPSPRPPGAAAAEPGTSSDQQAAAPECKLETDEVLKLFVLMGTPAAFLSRAKKMFGQDEPEKSAQPAKAADDARARAGAATTAETGHGKKSSASEPSAAACGPFAPPKLVPGRLGFGQFAASSARPFKLNSKPSASNDSGKKKLQ

SEQ ID NO: 3662 - protein, 479 aa, Zea mays
MAADDHVFRATNEASVALLRGLRAGTVDKAFIHNVDVYTAAPEELVAGLEPVPGTDVTEDGYNRQWYLYCPKRYKNGVGRASGHRLRAVETAGTCWHSETGPKPVEGLPGATFCSLSYGRKEKEDEGTSGRHRHRFDRMGWHMTEYDDTQGGGGDHVLCKVHRSSSSLAKKKCNTKRTATGDHPEAPPTKVIRDVQVQQMQDPAGAIFTGATAYPTMDDPRMVGGELGKSSVDYLLNINNVDGEQQQQQQPCAEPSSDVQVQVDPAATLMPSYVHGHQQGGDPLMAGGKEEQSRRVESPEAELDYFDDWLNNVDWKGFLEILGDNEEQGLPLQQQPCIEPAEQSSDVQVQVDPAATLMPCYVHGHEQGGDPLMAGGEEEQSRRIESAVAELDYFDDWLNNVYRKGFLEILRDYEEQGLPLQQQPCVEPAEQSSDVQVQVVPAATLMLGDHEEQGLPQQQQPCAEPAAEQSQSSRTVPSV

SEQ ID NO: 3663 - protein, 363 aa, Zea mays
MQSGSAGHQPRRLKLKALSKTTPRRRIPASISPAEAALPMLESDVQLGSSRAYPGVRAPGASKEAQEGHRGPVAQARDAELGGGASGRGRRGGVGTARGRGGAVGGVRAQPSPRRRLGVAGDGDPVVVVCALPAQPRHAFLRETKKKPQISTKKHIGIDPVRCQAAVPEWINDPSEECKANYRNDNDTLQRMGTVVRLPPTLEPPKARKAVNDMCKCYHPGSEAYVEVNVKEAWKRVKYQLGEQAFKNCGFGAMGERVLKLWTAEDKKKLADFEKLIPQSKSTIEDFMEVALKQFSSERTTDLAKYCYNVFLPRRFASLNRAGSTNSIDAISDDEGNSQDDNKVHLSEENGKSSGSSLKRSRE

SEQ ID NO: 3664 - protein, 886 aa, Zea mays
MDVEKPASKAHGFFALFDWGKKSKKRLFVGSTSSDPNLKDAADGKDIDDSTPTTSTRSNSILEDAPSLKESSEHSCSSSVIDEEAQSRRSPTVVARLMGLDSMPAASSPESNPVPLTVQPPFQPNSHEDLIGRSYVGSPLKMPGSPIDRFKMEALPPRLAKRTLSVAQYKLLSPMKNPNHISSRNAADIMEAASRIIRPGVENISSYRVHDVGNTNAARAYNPGELIGVQQRSQKLNEALRKRDGSASFRPPSGKPSDGRLRGSEGTSSSRISQANGCAPVAPKVKPGNRLDTARAMHAQEKGGMRKFGKKLETHKNPENSNAERSGLNRQKDSNQLGTSSSSVLVPNSRKQNATVTKHKVHSNPATPSRQRSNIHQINAHPRKARAANTFAGSSSQGSRKVDLQPDARANVRNNSVSKAIPKPRRLQDRRVYSDTSQSSDSINSDRSQRRIRHNIVIDEQSSFSTNKKKVSTEIVSFTFTSPVHKSLHGTHFPNHSVEKQILGNQNTVSTSSNTSNTKLDVIDGKFLGLLLEQKLRELTSGVRSPYTKPAEGAQVYHTSTALEDMASACETSSIASTDYDRESLQSFSDGKATLPYTNLATRSVQSSQPVKYDHGVTDRSELEHLGQSPLFTWEVSISTETCSSSESWRRPANGGTRLFSSTEGATTSDSTRFNKLLEADASSEYSDTASSITVATAEIARSESSSSWHMDSRQEVEFIREILNASSPARRISYLERFGNGNSSGILDPHLLEELNGGTRLLAGEEGKGHRLRRRLLFDCVNESLSVKYAHYFSAGYSLWFTGMAVLQSLSAAEMHREMTSLTVAEEWMVDELVYREMSGPMGSWVDFRTEAYQAGGDVAAELLGSLVDEAVAELLTSGGSSSSL

SEQ ID NO: 3665 - protein, 476 aa, Zea mays
MPPPPPPPPPPSTDSHAALLHSISTLASYSDTLADFLDQWNSVILDVASIGATFAALFPGPGSDPKPYHPAPEPDREPEPPLAPQPEPGPNAAPAPEPRWEREPSPSPGPGSDPKPYLPAPAPEPDREPEPTLAPPQSEPGLNAAAAPEPRWEREPSPSPEPAPAPNPDRERKDGGGAGAASAADLEHRCKQMNCGGVRRFVIVHLRDGGGEWLRQVVPGALRRAPDPAALVFHAVGRYYIRAESPDAEAACALLLELYVRAGCPRLRRGRGSEAAELLLRQEAREAALTWRSRLLRVSGAVGDAPGAAGARGLALFMAAFGVPAEFPAQELCDLVDAAQASACVQVLKASKLFAKKMRDVVIEMINKAMYLQAMRIILVFEFQEAFPLAPTLALIIEKLEHDTKDENEGQASERDEDDLALLSSISKCMEDHKLSPSEFTTFAAKIALLEERVGKARRQACSTGAKRKRPEECVE

SEQ ID NO: 3666 - protein, 151 aa, Zea mays
MAARLPPAAARRFSPLAGEPRLYFPQQPGRRLSLPRALSLPQLPCRRLPHHGAAIRRHPSPCGSGSACPSPLAPEARSRPPPFPGGLNPPRPDPARAFPDGVPLVGNRPPYPASSRRGLAGTPFPNGRRPFFHGVVTLHRHLRSRSPSSSR

SEQ ID NO: 3667 - protein, 603 aa, Zea mays
MCHSHSLVTGPMAANPLATLAIAVFLICLLLPTSSSSSSICVARTQDHVRTAFHFQPAKNWQNGPVYYNGMYHLFYQYNPHGALWDVGNLSWGDSVSGDLVNWAALGNALDPTAPFDANGCASGSVTILPDGTPAILYSGIDADRRQVQNVAFPKNPRDPLLREWAKPAYNPVVPLPADVSANDFRDPTTAWVGRDGLWRFAISAVADGVGATLVYRSADFLRWERRAAPLHASQDAVMAECPDLFPVAARGAEGLDASARGAGVRHVLKVSMPDTLEDYYAVGTYDDAADTFTPDEDCGGGDYRRWRRIDRGHLYASKTFLDARRMRRVLWAWVNESDSEADDVARGWSGLQSFPRALWLDGGGKQLVQWPVEEIETLRTRRAAPLQEVEPGGGVREVTGIVSSQADVDVVFEIPSLRRAEGLDPGRLHDPDALCREKGGSLTGGVGPFGLLVMASGDMREHTAVFFRVFRILHEYAVLMCTDLSRSSTKAGVYKPTHGGFVDVDIEKDMSISLRTLIDHSIVESFGGGGRTCMTARVYPEHVAAGSSSHLYVFNNGSAAVKVSKLEAWELASASVNVDDDGGLMAGGSFANMCRAEEYNSS

SEQ ID NO: 3668 - protein, 331 aa, Zea mays
MWAQLAVALFVALAVAPPARGSDVPSFPLSQAQSPSNSSSPSNAASRPCHLDLSAELFGGVAAACGAGGGPGSLDRGRCCPVLAAWLFAAHARTALSVPPAPPPSALVGDEGMGPDGDDDGPMVPYDNQRCVDTLGAALERRGVALPRPNATCDTVLCFCGIRLHQIGSLRCPAAFAVKTGAAARNATPTAAVKALEKSCRNASYAGCSRCVQSLQKQPWERAIPPGNHRIGPFLESLNTHLWGQTSFFRARAKAGYSPSYSPSALPPAFGSGKLIMEGSLGFFEKREADSVQMQNVLSIRNPKPPDREACSSVSPGAATATCGSRRRRSF

SEQ ID NO: 3669 - protein, 573 aa, Zea mays
MAIGHYNNSRATARTAAMRPSVESPMYAAMEGSTGYLMTPSRLLFVFFLALAFLAQCGGARVLRPEKMLLGHYSYSSTPAMPPYAELFAPPNPPSHPPGSPNCVLTPDTPPPPPAANTVQTPAFVYSSPPPPEVEYYYPPPYISPNPPDISPSPPPTVAPLPPIVYPSPPEVTPSPPEVAPYPSPSPPEISPSPPEISPSPPEVAPSPPPTVTPLPPIIYPSPPGATPSPPEVAPYPSPNPPEISPSPPEISPSPPEISPSPPEIAPSPPEISPSPPSYEPTPPSIVPSPPEITPSPPEISPSPPSYEPTPPSIVPSPPEITPSPPSYEPTPPSIVPSPPEITPNPPEISPSPPSYEPTPPTIVPSPPEYAPEPPAYVPSPPEYAPEPPTYVPSPPVYAPYPPGIIPSPPEYAPEPPGIAPSPPEYAPEPPGFVPSPPAVVPGPPEFAPEPPGPPAVPSPGGGFLPPVVFPPPFATPLPGGTTGSEWCVAKPSVPGAIVQQAMDYACGSGADCDSILPSHPCFRPDTMLAHASYAFNSYWQRTKANGATCDFGGTAMLITKDPSYDGCHYILM

SEQ ID NO: 3670 - protein, 125 aa, Zea mays
MNRGRHRSRKHVEGQPGHAAKAMSAVAVAAAAAALAGAEATAAAGLAVNQHRQPGKSYATGATDPCSLQYSSVVHSRYFHLKVFGQVFPWICKHEHVQKIAQVFGQVYSKADKPKYNLLVMNLCR

SEQ ID NO: 3671 - protein, 726 aa, Zea mays
  misc_feature (676)..(709): Xaa can be any naturally occurring amino acid
MDPEDTTPPAPSQGDAETTPPPVLEVAAGEDSLASGGEAAERAHEEEELAREVMELGLQNEYLRSQIAGVRPAGDADEVPGLVRGWKEQVERMSREVQEQRLTREATEKALEHVNVAYAEADGKVQELTAKLAQAEQKMEKELKERDDKYLELETKLQRLLKRAKQRIQDIQKEKVDLEARFNEVNQKAEQAASLQLAAQQELERARQQASEGLRSMDAERQQLRTVNSKLRANLDETRLALEVRNSSLEKLQQSVLEKEQLLDKVQGSLQSAENKGMAIISELTAKHQKQIESLQAQLAEVSAERTKASETIQSLQVVLTEKDSEIAEIEAASTGEAARLRAALEEMKGELVHLKDEHEKERQSWESTCESLRSKLEASENACLRSEKESAEVKSQLELELSTRSQLLQTKDSDLMAAKHEISRLESEFSAYKVRAHALLQKKDAELTAAKSSDFIKEHEEAIREAEKEVAAALAERDKAIDDLQKAESRHGDEIEARDMALADAEKKLKDVMKKLDSVTSNFISEKGSWEKNLMNVEESWRLKCESLKVQSNDHVDDELKKNLGELTLKYEKLKEEHQSFRDIADRMIEDKEREITKLLKENRDLHQSLDARPTVSNNDHQSQGPVKDTMSVELAEQQILLLARQQAQREEELAQSQRHILALQLERENRLMIXXXXXXXXXXXXXXXXXXXXXXXXXXXXXXXXXXVRCSQTRGPSVGPLLFC

SEQ ID NO: 3672 - protein, 191 aa, Zea mays
MRCRDARLCSAGGVRVVLTDFHRSNRTDFLLAGPAFAGLAKPGMAQQLNRRDALSVEYKRIPCEYKEKNLSIRVEEAGDRSRGKLVVKLLYQGGQTDVLAVEVAPVGSSSEWRFMTRAYGPVWSTDRAPAGPLQFRAVVTGGYDGKWVWAEQEVLPADWRPGQVYDTGVRIVDVARDASRGCTAAAMDDWK

SEQ ID NO: 3673 - protein, 368 aa, Zea mays
MGSHANGSTCAGDGPPPMEKRKEPAFPLKTMPLHANGWLNDMKLSSPTAVPVNIGSNSVAFDPIYRAWTQKYPSALNAFERIVACGKGKKIALFLDYDGTLSPIVDEPDNAVMSDQMREVVRSAALHLPTAIISGRSCDKVFDFVRLTELYYAGSHGMDIMGPVGKTGSVTDHRSRGTNSSKKQDKEMQIFQAASEFLPMIDEVFGLLVDKVRGIDGARVENNKFCVSVHYRNVNEKDWALVARCTDDVLKAYPRLRLSHGRKVLEVRPMVDWNKGKAVEFLLDSLGLADSDEVLPIYIGDDRTDEDAFKVRGQFGSFLVMLENGLRCFKTCRFYGETNGVWGFWCHLYRRNLRRCTPCWIHLRSWTS

SEQ ID NO: 3674 - protein, 923 aa, Zea mays
MGSAHFAALLLCACLFVSGTVAADQNGNLTRPAEVRIGALFTFGSVIGMAVRPAIELAVADVNADPSLLWGTKLSVLMQDTNCSGFVGTIEALQLLAKDVVAVLGPQSSAVAHVISHAVNELHVPLISFAATDPTLSSLEYPYFVRATQSDYYQMGAIAAIISQYEWKQVIAIYVDDDYGRGGITALGDALAKRKCKISYKAKLPPGAAKTTIEDILMQVNDMESRVYVIHVNPDSGLNVFSAAKSLGMMSSGYVWIATDWLSAVIDSSVHGIPDVMELTQGVLVLRQHIADSDIQHAFLSKWNNLTRNGSSYFMHAYDSVWLVAHAVERFLREGNAMSFSADPKLQAKKGSSLQLDSLRIFNSGDKLLEKVWSANFSGVSGPVQFTLDRDLVHPAYDILNIGGTGLRTIGYWSNSSGLSAVAPENLSSSARDSSANNVQLRGVIWPGQTSEKPRGWVFSHHGMPMRIGVPLRTSYKEFVMQDDGPDGVKGFAVDVFKAAISLLPYPVSCKFVLFGDGLKNPSYSELVQKVSENYFDAAVGDIAIVTNRTRLVDFTQPYIESGLIIVAPARVIESNAWAFLKPFTFQMWCVLVVIFLFVGAVVWILEHRSNTEFRGPPSQQIMTVCWFSFSTMFFAHRENTVSALGRFVLLIWLFAVLIINSSYTANLTSLLTVQELTSGIQGLDSLISSSSAIGYQVGSFSRNYLVDELSIAESRLVALNSPSDYARALELGSGNGGVAAIIDELPYVEIFLSKYCKFKTVGQVFTKSGWGFAFPRDSPLAEDLSTAILALSENGKLQKMHDEWLSGTECSADNGAGPSNSLSLSSFWGLFLICGLACFLALVIFFLRIFCQYSRYSNQVEAQFAEPRVLNRPARLTTIKSLISFVDKKEEEVKNALKKRPNGTGQQHPSTPNAEEQPTLPP

SEQ ID NO: 3675 - protein, 379 aa, Zea mays
MNIDLENEKDKTRNLESENLFLKNSCEQQKHLLYVITCSHEELKLSHEELSVAHENLVHDHVFLTNKIYSEEIKTSENSSHDLYDQLQNAANPCDEDKKNVSTSCDDLLAMSCSSTIDYYYSSLSCGTNLLKENNKLKNKVKNSSNMFERWHKSKVSHDLIMKNQIRYDDKSGLGFNKSNIKGRQLKLKGNKIFHFMCYKCHEMGHLAKACPNKRKLKLKKEEWRLKHDKCFKCHTWGHLTSMCPTKKLVNPQVKPQPKSRVEQKKNPQKQIKINHEYNGDVGKTRRERRRHSIYNQYDMMITNQKKKDDLAQIKCYMCDDMGHFASRCPNNLEKKAQANEKRQDNVKQNLRKKEKAQTKRTCYTCRERGTHGKFMSLR

SEQ ID NO: 3676 - protein, 184 aa, Zea mays
MDRVPDGVEEHKSAADQANEAGLADDSTAVPWLKLGLDAPKSEEAKPPREVKPVATPHRTFSCNYCMRKFFSSQALGGHQNAHKRERCAARKPYRFQMMTGLNPPSDSFLQPLRVNSHSTILKDHGESAAAAVVARFDGGPMSSWMPFAIEEPGGLVWTGSFTASSEESKKQIEQKNIDLTLRL

SEQ ID NO: 3677 - protein, 262 aa, Zea mays
MASKSTMRSLVLIMGLLLLSCSGMSSAARLLEEMAPKEEYPHPEVPELPKPELPPHPTVPELPKPDELPPHPVVPELPKPEVPVHPAVPELPKPEIPPHSTVPELPKPEMPELPKPEVPEHPAVPELPKPELPPHPTVPELPKPEVPELPKPEVPEHPAVPELPKHELPPHPTVPELPKPEVPELPKPEVPEHPAVPELPKPELPPHPTVPELPKPEVPAHTAVPEPEPELPKHELPPLPEPELPLPPKAESHYPVPGMAKP

SEQ ID NO: 3678 - protein, 164 aa, Zea mays
MPSSSLAFLMALLLLSCSTTMSSAARYLEEETKPAPHPTTTTVPELPKPELPPHPTVPELPKPELPPHPTTVPELPKPELPPHPAVPELPKPELPHPAVPEVPKPELPHPEPEVPKPELPPNPTVPEVPEHVPVVPKHEFPPLPEPELPPKPESHYPAVPDAKP

SEQ ID NO: 3679 - protein, 347 aa, Zea mays
MALPSSASHSARLRLLTVPALLLLLSSAALLVFLVLPSLSPSSASSSAASGHLCACSPPATHTTTTVTTTTTTASPAPVTTSPADVAWLKAQLASNSLLLAAGGGHDAWHRLRKGINPRTREQQLFDINRHHGISHYPDEEATNHTALPCPGELLVEEHHSNYGEPWAGGRDVFEFLANASVLTPTEQVLEIGCGTLRVGLHFIRYLEAGRFHCLERDELSLMAALRYELPAQGLLYKRPMIVRGEDMDFSKFGDTVMYDLIYASAVFLHIPDKLVWTGLERLAGKLRPHRGRIFVSHNIKFCSRLGGDECTRRLAKLGLEYVGKHTHDSLLFNHYEVWFEFRRPKV

SEQ ID NO: 3680 - protein, 675 aa, Zea mays
MVQTKHINNQEKLDGMVIVEHNTFGLFSREFAHGLHLIGPREVRAPSLVRAPEQSSLPDLHPSVIARMKQMARKSMGGKAPRKQLATKGARKSETRTCGVKKAHQLRPGTAALCEIRQYKKSTELLIRKLLFQHLVGHDATWFLLDIAFYSHNRFQEDSTSISGIPMSNTRSAEEEEVLATSPNRCLTNCFKLIQSCFSWDAVPYRQPWPPPHMQVEFGCGSADLCPIPWLFFTTIGTNEEIIDITSDDDKVDNVVDQLIDEQIAAVVFVPACMEATPNNGINTSKTMETFAAHQSPEYDSGLKDKDQRISFEDEISEGGQAEQSTPQQELCAMPPDTSDRETVERTTRSIEVEHFSQVESKHKMNSMSVEASEHVTITQIEKKQVQQVEITQELDSLPICSREHSDEALEGERTVQAGLEQECEVLGILSTITSDIFAIGLSPNQYTVYFYQNLMACMMLIRRRFLLSFGRSWDAVTYKQPWPPPVHVVILGDGLSVRLTPWQPFDTDIYSFPVNRPESSASVFGIATESTQCAYDSQGNSVSTILLMMQRCLYEQMMQYKSEEGCTRVVKCLPPADASLLVWAVNQMTDPLIALMYAVQVMIFLKDKDESPREDVLLLQKDPFDGNRHQKPNVTLAISLRKDLGVIAACTAPTNEVPTYVEDYTSSSKSATAG

SEQ ID NO: 3681 - protein, 61 aa, Zea mays
MAQQPGCAPGLQLLCLRRLAGSGARLCACKLSLSAWLHRNELKLETGSEATLAFSATWLPG

SEQ ID NO: 3682 - protein, 768 aa, Zea mays
MPPRSPPLAAAADVASVVTRCPHAEPSSELTASTIPAYRALIRELVSAGRLDDVDAALASARSHLAPDSLQPLYVASIQAYARAGRLRAAVDAFERMDLFACPPAAPAYNAIMDALVNAAYHDQAHKVYVRMLAAGVAPDARTHTVRLKSFCLTGRPHVALRLLRSLSERGCDAKPAAYCTVVRGLYAHGHGYNARHLFDEMLGRDVFPDVATFNNVLHALCQKGDVMESGALLAKVLKRGMSANKFTCNIWIRGLCEDGRLEEAVALVERMGAYVAPDVVTYNTLMRGLCKDSKVQEAAQYLGRMMNQGCIPDDFTYNTIIDGYCKSGMLQEATELLKDAVFKGFVPDRVTYCSLINGLCAEGDIERALELFNEAQAKDLKPDLVVYNSLVKGLCRQGLILHALQVMNEMVEEGCHPDIWTYNIIINGLCKMGNISDAAVVMNDAIVKGYLPDVFTFNTLIDGYCKRLKLDSALQLVERMWTYGIAPDVITYNSVLNGLCKAGKAKEVNETFEEMILKGCRPNAITYNILIENFCKINQLEEASGVIVRMCQDGLVPDAVSFNTLIHGFCRNGDLDGAYLLFQKLDEKGYSATADTFNILIGAYSSKLNMQMAEKIFGEMISKGYKPDLYTYRILVDGLCKAANVDRAYAHLAEMISKGFVPSMATFGRMLNLLAMNHRVSEAVAIIHIMVRMGVVPEVVDTILSTDKKEIAAPKILVEELMKKGHISYRAYEVLHEGVRDNKLTRKARKADASIMFVSQHHKRSYQ

SEQ ID NO: 3683 - protein, 539 aa, Zea mays
MAAITAPPAPPPASTSCRLLRRRAPLTRFAASSSPSSRFRPSSSSFPAAAGSSSGGGGEILHVSPPPPPAAPPGVPVYVTLPADAVDPGGRVARRRAMGASLAALAAAGVAGVAVELWWGVVERRSPGEYDWAGYLELAAMARRHGLRVRAILAFHQCGAGPHDLPWIPLPQWVLEEMDKIPDLSYTNRYQKRNKEYISLGCDILPVLKGRSPMQAYSDFMRSFHNTFEDYLGDTITEVQVGMGPGGELRYPSYPTEKLNQPGSSSELGEFQCYDKFMQASLSARAQIFVLQQWGNGGSTGTDGSQQNLEETSFFRTDGGYWNTPYGHFFLKWYSGMLLLHGERLCMIADAIFSGTGVTISGKVAGIHWHYYTCSHPSELTSGYYNTLLRDGYLPIAQMFAKYKATLCCSCFDLRDAERTNSESSPEGTLRQLAGAAKMCNLPLNGENSATRLDDASLNQVIRSSRLYSGRTSGTSFSFNYVRMNKSLFEFHNWNRFTKFVRQMSDARTFLARLYVRRGQQYLSSMSVVWVVSRACAYT

SEQ ID NO: 3684 - protein, 289 aa, Zea mays
MSSNGKPTPQPPAGGNGPPKMYQRPIYRPQQAPAKRRRGGRSCPFSCCCCFFWTALVVLLLAFLAAVAGGAFYLLYRPQRPAFTLTAARVTRLSLSPSATAPALSDAIDVTLTARNPNRKLAYLYDDFAVTAATAANAVPLGEASAPGFAHGAGNVTVIRATVSASALAVDPAAAASDVKRSGEFTIALDLETRAGVRVGALKTKKIGILVHCDGVKVAAPAPAPAAPAKSKKKLAKAAVAAAVAPAADAPAPAASAAVDDAPAPPAAATSVARVCQVRIRVKIWKWTF

SEQ ID NO: 3685 - protein, 231 aa, Zea mays
MVRSSAATEVGQVPDGRPLPAPVATGGGGGGTGTGGGREPEGLPCPRCESANTKFCYYNNYNLSQPRYFCRACRRYWTRGGALRNVPVGGGTRKATPAGRRKRAGPAPATAAPPAPPPPSALHGSLLRPYGGLSFAAPALASPLAAVDPDRRLLDLGGSFTSLIAPGADVGVHFSAEFLVGGLAPAALPRATASVPALPPPPPQQHQQPTTVSQALPEGLFWSMGWPDLSI

SEQ ID NO: 3686 - protein, 577 aa, Zea mays
MVCMGDLISLCGFGTVMPPKSKKSVKGLFKGLGLFQGSSSSSSRRRELLNAVHGDEDEQHTEEQHIEQEQHNEAEQHNEEVEHNEEVEHVTWDQAAQHHQPWDQWDHQREQQQAWDQWGQQGEPADNPMDDGSGGSSATRTRRSRKSHSVKPRHAIEREADRTLIMPHGDRNWEDLSFDGKGHHTQVNLTLGSLCRLHYPGIVKVSNGDTEDEVLVSTWDEYKFKKERNHIDRQGLVRNDFWFRYRLPDGEDYMGHAERVLQNNAKKLVMVPWMAPVPDAYYAWCRYWASEGFQKASAHHRQCRGTNPNHKFGGDDMIRKAKRMEATSGQKPSDIEVYQEGHKGPDPNNPDQLCSQTATDRLAAYGEEMVRRHGPDYDWRHEPVDPSVVYASGGGKAHGRYALFDGFIDSSSVRSQRTGSSSRSSCSRRPNEQELEIMRMREEMRQQREFMEACNAHNQAMYQDKSETQGTLKRFLRRAQNEFELKVKKIRSDNGSEFKNLQVEEFLEEEGIKHEFSAPYTPQQNGVVERKNRTLIDMARTMLGEFKTPERFWSEAVNTTCHAINRVYLHRLLKKTS

SEQ ID NO: 3687 - protein, 151 aa, Zea mays
MLGYEYAITRCILSGHRPISSTFNTGHTWAVFFFFVWRGVGLWMSVEYGPSRLRLLDFGCLARMHDGRRAVHHLWFYKHTAMDSWFVNTICLHSDFLTLAEHAKKERGYVFVLRLVRDPVRLSHIRDSDLSDALRECLLKESLRLNIGDVS

SEQ ID NO: 3688 - protein, 101 aa, Zea mays
MGGRLGVAPATVYDLTPPLPSTWLPIAAAAGTGAKLLGVGVLAALVVGFSYGCSGGAHRAHAIFVVAVLHGLSSPKAPIELVVGVSVSLGFPPPIGFTRLY

SEQ ID NO: 3689 - protein, 151 aa, Zea mays
MGTARGAGAAGGPRHGEGEGKRRGRAVAPARRGARADGLGRRSRRGEGDGEELGRVTVPARRGRARGARAGGGPGAARSLGGRVRRRGARAGEGDGEELGQTRGAGGQPQRGDGMGGWPRHGELEGGGRGGGETGGEGAAAATVSEIVRVK

SEQ ID NO: 3690 - protein, 380 aa, Zea mays
MDASQDVWDWDWELVLPDHRSFSLSNGGKNLDDKETVEHDLLPPSGDVDVHDECKGIGVLDETCKSAVPSVADPIMNSEGGEEEKAIQRPDAEESVTADSKFAQEEEEEEEDIKKDGDDKVGALIGALCSFGVAAATACVFLIGGRLHHHHTQQHKIQLQFFGDDKGVKSAFDGVVRVGGGTYSINHQVERAGLWWTHGSAPSANVVTKGEDVGEVPVDDDGGDDPWHDVDDCVIIGAEIAAGVYDGDTMHGGVEGAKRDGLMEEGLGIVSERRVQAEGDEDDISTVMDVGLEAREDADGGNALRRPADLLGRDTCPWRAAFGGDSGVSEEAGTGYRAVDSDGERVGAAALGVVRPVSAMVDLLSSISLLKNQVPMILRL

SEQ ID NO: 3691 - protein, 181 aa, Zea mays
MVRMLGKFLSTAATVMTHGAALMTVIIGAEIAAGVYNGDTMDGGVEGAKRDGLMEEGLGIVSERRVLAEGDEDDISTVIDGRLEAHEDADGGNALRRAADLLGRDTRPWRAAFGGDSGVSEEAGTGHRAVDSDGERVGAVALGVIRPVSAMVDLLSSISLLKNQVPMILRLQAKPCFTESW

SEQ ID NO: 3692 - protein, 400 aa, Zea mays
MVLETAGGHGRNPNGILGLLCREHFPGLVEYAGVTSPAYTFDHYAVAPDAVDRDGRQFNNKAERVKQELWDFFRCDAGYEARADVVSTTCCKKLVVDMHYEARIQAIVTYHGSVLGEKVNKKDARTMSLTADQYLQMIPHWCAAHPECWEKMVQRWCSAEWDEAHNASRERRLLMQGPSHHQGSRSLGKYAEAWSAAHGGAPCSTFSAYAMAHKGKATSDVTYNPDDGPEAYTNPAIHSRLSEYTAMAKEVHGPDYDPRTEDIDGDVLMRVGGGKRHGRYWIADGAIDSSSTPTLSQVRARSTSASPAIRPRQDTSQHRIQQLQTQLDDERRQREELEKRMAEMFAYMQSLGAAQGHAPPPPLFPAADPTEFTTPGQSVASNNPHASSSPSPNQSRCPPR

SEQ ID NO: 3693 - protein, 327 aa, Zea mays
MASASAPEVVVVFDFDRTIIDWDSDDWVITKLGAADAFQRLRPTMRWNPLMDRMMAELHARGKTPEDIRDCLRSAPLDTHVVSAVKTAAALGYARHNHTMPTTFSPAAAALAFGTDRPMFFDAGNGMAAAAPVCRCDLKVVSDANTFFIETVLAHHGVLGCFSEIVTNPASVDADGRLRISPFHDPASAPHGCSLCPDNMCKGKILGRIQATGSDKKRRRRFIYIGDGKGDYCPSLKLGEGDHVMARENYPLWHLICDNKQLLKAEVHPWNSGEELEKTLLKLAGEVISPPAQASQFDYSKCEMSNPASCPPSCAALITDQLLVRKY

SEQ ID NO: 3694 - protein, 264 aa, Zea mays
MAAATMAITSRALVGKPAAGTRDVFGEGRITMRKTAAKPKPAASGSPWYGADRVLYLGPLSGSPPSYLTGEFPGDYGWDTAGLSADPETFAKNRELEVIHCRWAMLGALGCVFPELLARNGVKFGEAVWFKAGSQIFSEGGLDYLGNPSLVHAQSILAIWACQVVLMGAVEGYRVAGGPLGEVVDPLYPGGSFDPLGLADDPEAFAELKVKEIKNGRLAMFSMFGFFVQAIVTGKGPLENLADHIADPVNNNAWAYATNFVPGK

SEQ ID NO: 3695 - protein, 421 aa, Zea mays
MKREGLETPPPPAKHPKNSSPTSATPIHSLTDDLLLQIFLRLPSLATLVRAALACRAWSRAVVSSPAFRRRFRELHRTPLLGFFFECPSPVQDPAIPLFPSFVPVRRREGDLSIAVRGGDFFLTCLQEHPIKSQSWDILDCRGGYVLLCNDGQPGAQAMAVVNPLARQCRSVDYRHVDALEGRRGTFFDLNGYLLCSEEDPASFRVVLIAHDESRVRATVFSSDTCEWQIHPWVDVPGPPRGSESWLLKCTMQSNGFLYMVYKNDGYMVTLNTATMEFSAEELPQLLKNERCSFSVGETINGAPCIVYAIGFTVGVMLSSTDVDGTKKWMLDRVTRFRWNQKCMYDGLLVLAVRDGFAYLATSNKTCFFAKSSWFWSLCLQTMKVENAFQRTYGTVAYPYVMAWPPCLVGNNGRSALDDGM

SEQ ID NO: 3696 - protein, 591 aa, Zea mays
MDGKKVQERAAWGASDGGGNLVQDAVDYRGCRADKSSTGGWVAAALALGIELCERLATMGIAVNLVTYLTDTMHLPSAAAANVVTDFMGTSFLLCLLGGFLADSFLGRYLTIAIFALIQAIGTGLLAVSTEVRQLRPPPCGPGAAGPCEQATGFQMGVLYVCLYLIALGTGGLKSSVSGFGTDQFDERDARERAAMGLFFNRFFFFISVGTLLAVTVLVYVQDHVGRSWAYGICAAAMLAAIAVFLSGTRRYRYRRSSGSPIVHILQVLVAAARKRNIAKHPLAVSALYEDRPEHARIPHTAQFPCLDRAAVMAGDDDNEVGHDGRPTPNPWKLCSVSRVEEVKMVARLMPVWATTILFWTIYAQMITFSVEQATTMDRRMGGFEIPAASLTVFFVGAIMLTLAFYDRVFVPLCRSLMTGRQGLTNLEKIGIGLVLSIVGMAAAAISEKKRLAVAATSGVAGHGSLPISVFMLTPQFLLVGAGEAFIYTGQLDFFITRSPKSMKTMSTGLFLTTLSLGFFLSSALVSLVKSCTRWLGDTINHSRLDYFYWLLAVLSVVNLVAYLVCAMWATAPTSSQAEQPQPAMVADEKC

SEQ ID NO: 3697 - protein, 345 aa, Zea mays
MAMAAQQHRHHKRRRIALSPSPSPSLAPIPGAPTPPLDSLADELLFLVLDRVAQADPRALKSFALASRACHAAESRHRRTLRPLRADLLPAALARYPSATRLDLTLCARVPDAALASAAVSGSSALRAVDLSRSRGFGAAGVAALAAACPDLADLDLSNGVHLGDAAAAEVARARALRRLSLVRWKPLTDMGLGCVAVGCTELKDLSLKWCLGLTDLGIQLLALKCRKLTSLDLSYTMITKDSLPSIMKLPNLQELTLVGCIGIDDGALVSLERECSKSLQVLDMSQCQNITDVGVSSILKSVPNLLELDLSYCCPVTPSMVRNFQKLPKLQALKLEGCKSWPMD

SEQ ID NO: 3698 - protein, 236 aa, Zea mays
MAELAASLVVAPLLSMLKEKVSSSLLNQYNVMEGMEKHHKTLMRWLPAIQEVIADAERQTSRRGVEKWLEQLKTTAYEANEVFDDFEYEALRRRAKKNGHIAKLAIMARVKLFPTHNRVAFHIRMSYRLRRIVDTFKDLVEEMNTFGFNKLEPEATTTWKEWRETDSIIVDPENIVARSRHDERKKIVNLLVNGHVTDGDLMVVPIVGMGGLGKTTLAQLIYNDPQVKEHFHLLKW

SEQ ID NO: 3699 - protein, 491 aa, Zea mays
MENANASSCRNGDGTQTPPPHVAMLATPGMGHLIPLAELAKRLAQRHGVTSTLITFASTASATQRAFLASMPPAVASMALPPVDMSDLPRDAAIETLMSEECVRAVPALTEALLSLKQRPTTTGRLVAFVTDLFGADAFDAARAAGVQRRYLFFPTNLTALTLMLHLPELDASIPGEFRDLAEPLRLPGCVPLPGTETMKPLQDKSNPSYRWMVHHGAKFREATAILVNSFDAVEPGPAEVLRQPEPGRPPVRTIGPLVRAEDGGGSKDDAPCPCVEWLDRQPAKSVIFVSFGSGGTLPAEEMRELALGLELSGQRFLWVVRSPSEGGVGNDNYYDSASKKDPFSYLPQGFLERTKDVGLVVPSWAPQPKVLAHQSTGGFLTHCGWNSTLESLVHGVPMLAWPLFADQRQNAVLLCDGVGAALRVPGAKGREDIAAVVRELMTAEGKGAAVRAKVEELQKAAAEGLRDGGATAAALAEVVKEWTSADDSVY

SEQ ID NO: 3700 - protein, 565 aa, Zea mays
MYQSRRSTDDEVNIQEDTMAATSSKATGPWSRLSEAEAAVNRAVAGSHVGRYFKLDARKSSFTKELRAGAATFLTMAYIISVNAAILTDSGGPCTARDCTPVATATNSTTADCAVVGAKANPGYQQCLARTKSDLIVATAVAAMAGSFAMGLFANLPLALAPGMGANAYFAYNMVGFHGSGPIGYRTALAVVMLEGLVFFALSAVGLRSRLARMIPRNIRLASAVGIGLFLAFTGLQAHQGVGLVGASPSTLVTLAACSDVDPATGACLGGTMRSPTFWLGAVGFLITATCLGRDVKGSMIYGILFVTVVSWIRGTSVTVFPDTAAGNAGFDYFRKVVDFHVIRSTAGQLSFGGFRHGNVWLALLTLLYVDVLDTTGTMYSMAEYGGFVKEGGGFEGEYRAFLVDAGSTVLSAGLGSSTVTTYIESTAGIREGGRTGLTAITVAACFLASLFFGPLLMSVPPWAVGPSLVLVGAMMMRVAREIEWGDMKEGVPAFVTMALMPLSFSIANGIIAGLGVYVALHWYDWARHGYGKLRNALDERRNQVAAAAATATAGEVGPAAQGIV

SEQ ID NO: 3701 - protein, 235 aa, Zea mays
MNRIVAEAALSPLRFANGSQPYNERRDDTYGVVQCRMDLDPVHCTDCLNYLIQKLLTRYPNNTIASARGTSCYARYQTDPFDAILDPPAVVAPPSPPSCKKDASRRRLIVGLEAAAAATGILFLLSLSVQLWFFSRWWQRSRIDKDDMEDKFKNGAGPKRFSYNVLAASTGNFSDEQKLGEGGFGSVYRGFLAELNLHVAIERVSKGSRQGRKEYASEEVEAPQPRAAHWMVPQP

SEQ ID NO: 3702 - protein, 914 aa, Zea mays
MGRAGFLFLPLLLLLAFAGPGPASAATAMTPDAGVILDLAKSLTNPPPSWTGTDVCGGVSFSGVTCNGAARVTGINLAKLHLSGTLSSSLANLTALQSLQLQGNALEGDLPSLAQMGSLETLVLDGNAFSTLPPDFLEGLPSLLKLSMDDLPLEPWSIPDAIAGCAMLQTFSASNASVSGPFPAVLANLTSLQTLRLSYNNLTGVLPVGLEALGSLETLQLNSQRSNGMLSGPIDVVAKLPSLKTLWLQSNSFTGPIPEFDPNTQLETFNVRDNSLTGPVPPSLVGITSLQDVALSNNFLQGPKPKFAAKTVDIDSGNGFCHEDPGPCDPLVTTLLGVASGFGYPLQLKKWAGNNPCDPWPGLSCIKMDVTQIKLPRRNLSGLISPAFANLTRLQRLDLSNNRLTGVIPDALTTLKSLNYLDVSNNRLTGQVPEFKQHIKLMTAGNSFGESGGDSGGGGSNVRSSSSNPTGSHNSKSNAGMIVGILLVVILLVICVGLFLHHRRNKNVDKFSPISTKSPSGESEVMKIQVVGTNGHSNISGSVGSTELYSHSSADNTSIADLFESHGMQLPMSVLLKATNNFDEDYILGTGGFGVVFKGTLNDKLVAVKRCDSGTMGTKGLQEFMAEIDVLRKVRHRHLVALLGYCTHGNERLLVYEYMSGGTLRQHLCDLQQSGYTPLTWTQRMTIALDVARGIEYLHGLAQETFIHRDLKPSNILLDQDLRAKVSDFGLVKLAKDTDKSMMTRVAGTFGYLAPEYATTGKVTTKVDVYAYGVILMEMITGRKVLDDSLPDGETHLVTSFRKNMLDKEKFRKFLDPTLELSAESWNSLLEVADLARHCTAREPYQRPDMGHCVNRLSSLVDQWKPTNIVDDDDEEGGTSEMGLHQHLEIWRCDDFTISDSDSFSAHNTSRKYH

SEQ ID NO: 3703 - protein, 325 aa, Zea mays
MDWAAASGSPSWGAAATDPGPTMLSFAGPSSSAADAEVRLQDFAAGLAQSSRPTGAAPGAGRRSRAAVGGAGAEACSVDGCRSDLSRCREYHRRHKVCEAHSKAPVVVVGGQERRFCQQCSRFHMLSEFDEEKRSCRKRLDGHNRRRRKPQHDLTNLGGFFPYHQVNQFEFYPQTIPTVGQNSDAVHLVGRQQPFSISFSRTPDEFPFPQGGGSSVLHHLHAARPGHHAEGSSHTGSSTRDNALSGTLGPECALSLLSSSLRRPSTAGVPAVGQPQVTASSTTAVSQAATAAVATAAFAASAGHHVFVPDAMFEDPSQALPFSWQ

SEQ ID NO: 3704 - protein, 446 aa, Zea mays
MDAHAVDIPSLAEELRKELATADALAARSASLYPVVIAEVGPRTRNVCPEDYDPSHVSIGPYHHIKNPKLVRKQDKIRSLSTVMSAAARVDVKSYIDVVAGIEAKARSCYANTFDNHIDSNDFVRMLLLDACYVLVNFGGIGGGGHRGSDMMEDVGVVRDVIYLAENQIPFFVVDEIRKLTIPDGGGGSAPDAITGYVRKLLRELQYSVATPAVAEPPGPDNLLHLLHMHLMPTVALPSSRSTVGTGKPRRFGRWRSATEYYCAGVGFRSRPLGGKGARSILEVKLDYYGRTLEIPHLKIDAETSRLLRNLMALEQSNPEEVGSHVTAYCVFLSQLAGTVQDVELLSRRGIIAHGLGSHNEVATSLANLCKGIAFGGDDPESNYLRATWEGLEESFRSRPRRWAAWLMLKYFRNPWLAVGLAAAGVGLVCTVVQAVYAVLAYTSNP

SEQ ID NO: 3705 - protein, 362 aa, Zea mays
MVLETAGGHGRNPNGILGLLCREHFPGLVEYAGVTSPAYTFDHYAVAPDAVDRDGRQFNNKAERVKQELWDFFRCDAGYEARADVVSTTCCKKLVVDMHYEARIQAIVTYHGSVLGEKVNKKDARTMSLTADQYLQCWEKMVQRWCSAEWDEAHNASRERRLLMQGPSHHQGSRSLGKYAEAWSAAHGGAPCSTFSAYAMAHKGKATSDVTYNPDDGPEAYTNPAIHSRLSEYTAMAKEVHGPDYDPRTEDIDGDVLMRVGGGKRHGRYWIADGAIDSSSTPTLSQTQLDDERRQREELEKRMAEMFAYMQSLGAAQGHAPPPPLFPAADPTEFTTPGQSAASNNPHASSSPSPNQSRCPPR

SEQ ID NO: 3706 - protein, 574 aa, Zea mays
MDAAGDAMERGDRAPLLPVSQGPKVRDDDSLQVPLLKDKKRAGSKAPAVVLGFECLESTAFNGISTNLVVYLETVLHGSNLASASDVTTWFGTSFLTPVFGAIIADTFLGNYNTILVSLAVYLLGMMFVTFSAFLPTAAALGGATSVFGAKTVAFLGLYLVAIGRGGVQSSLAPFGADQFDDANPADRDSKASFFSWFYLCVDFGMIVSGLVIVWVQDNVSWGLGFGISTACLALAFAAFVLATPMYKRRMPTGTPLKSLSQVVVAACRKIALKAPADAGMLFEVSDKVDAAQPKIAHTDEFSFLDKAAIVSESDMEEMSSEEACSSSWKLCTVTQVEELKILMRLLPIWVTSVIVSSAYAQMTTTFIQQGSAMDMSILSVPVAAASMGSFEVVFLLTWVLLYSKVIVPVLRGFSSGGDGEPSQLQRMGAGRLLMALSMAASALAEMKRLDSAARGEEITIAWQLPQYFFMAGAEVFCYIAQLEFFYAEAPDTMKSTCTSLSLLTIALGSYMSSFIYAIVAAFTATPDSPGWISDNLNQGHLDYFFWTMAAMCTLNFVVYSGFAKNYKLKTVLS

SEQ ID NO: 3707 - protein, 625 aa, Zea mays
MAYHIHRLNKSCRLNASLGEDGRLQKLLRRRTRGIKSSDKKRLMDATTVDSKWISPATEDGSMDRRGNPAVKTTTGRWRSAILLLANYGLATCAFFGVGVNLVVFLRRVLHQGNAEAANSISKWTGTVYIFSLIGAFLSDSYWGRYVTCAVFQIIYVMGLVVLSLASWLLLVKPSGCGGVKAHCDGPSAPGVALFYLSTYMIAFGNGGYQPSIATFGSDQFDETDPEEARSKVAFFSYFYLALNVGSLLSNTVLVYYEDSGRWVMGFWVSAAAAALALVLFLLGTPGYRHFKPSGNPLTRVAQVFVAALRKWRAEVPRGELLHEVVEAGEDPKVSGIRKILHSDGLRFLDKAATITEEEEEEGPWRLCTVTQVEEVKCILRMLPIWLCTIVYSVVFTQMASLFVEQGATMDTNIGSFHFPAASMSLFDVLSVLAFIAIYRRVLVPVMARLSGNPQGLTELQRMGVGLVIGMAAMVVAGVVEVERLKRVAAPDQPSSLSVLWQVPQYALIGASEVFMYVGQLEFFNGQAPDGVKSFGSALCMASISLGNYVSIMLVSVVTSLTAGEKRPGWIPGNLNSGHLDRFYFLLAALSLVDLAVYVACAMWYKGIKLDGGDGDNRRKVSAHV

SEQ ID NO: 3708 - protein, 254 aa, Zea mays
MLSSHPLTPRCLARLLALPLAPATSMLLLDWYASSHPALSLSSLPLRPILAAADPDRALVLLDSLPASCLPPLRDSLLLRSLPPGRALHLLDQMPRRFAVAPSFRSYNVVLSTLARADCHADALLLYRRMLRDRVAPTTFTFGVAAHALPPRPRRRRARLLHGMARHGCVPDAVLYQNVIHALVAQGGVAEAAMLLDEMLLMGCAADVNTFNDLVLGLGRVREVARPVDRMMMQGCMPSAVTYGVGDLFSSARS

SEQ ID NO: 3709 - protein, 387 aa, Zea mays
MWATSPPPLPLQLRRPPHPRFIARRRNKRLDRIAASQDPLTALTRVLWGGALPPAQLVVAVRHGWTTAWQLLMRQLAPSDPATGGFARAPARFPAVVGKPSSRLHLYVGLPCPWAHRALVVRALLGLEARLPVSVAVPGDDGAWSFTPGSPDLLYGKRKLREVYALRGGGFEGRASVPMLWDAERCEVVCNESIEIVKFLCDLAGDGAGDLDLWPPELRQDIDRWYSIIYPSVNNGVYRCGFAQSQEAYDAAASELFGALDRLEAHLAGCRYLCGDRLTLADVCLFTTLIRFDLVYNTLFRCTRRKLAEYPSLHAYTRDIYQMPKVAETCDMEAIMAGYFKTLFPLNPGGIQPHPPATCDRESLLRPHGREALSSAAGTPLEAAAVS

SEQ ID NO: 3710 - protein, 564 aa, Zea mays
MGGGGPHSAELSAQSRRQGASEVQSLETHHGDRSVTHRFLLYSYHFLRLSDWIATLGAIYDGPGIQDYSNANDMQLALAHRRNCTYLDGKDFVDFGSIDWGRLLRNHGISDSEKVLIFFDDHQSELKRLKQALKAGFRHLIFEDNYDTGTCDHYFLRHIYDPSYIRGLWIVTLDSKCPWRSPGGRIGDWGLGGVGCCWGFGGGCRREALATECCTPTANRGYRAGGQKQPATTVGHRDLYGPSKYTRHLQATKDTLRQEGDITPPTGIRQAMEMQAEVERRICAQFDHLLYCSRAAEEPGAQGTANRRGAVQWLERRRLDCRQLRGSWIWSMRGDEAKRVCPGINLVQVPVARGKANLNLYRSAGAEVVAILASKGKCERASIDEVYLDLTDAAKEMLLQAPPDSPEGIFMEATKSNILGLPADASEKEKNVRAWLCQSEADYQDKLLACGAIIVAQLRVRVLEETQFTCSAGIAHNKMLAKLVSGMYKPAQQTVVPSSSVQDLLASLPVKKMKQLGGKLGSSLQDDLGVETIGDLLSFTEEKLQEQYGVNTGFDHIIYLPTTI

SEQ ID NO: 3711 - protein, 376 aa, Zea mays
MAVIAYRRAVLLHGHQRSRTARALDPSVVAVASHGRGRRRTWPSSPTGVRCSCTGTISGRNGGRPHPAPTPSRSGAVPSSEKAKIQPPSSTTTASRFKHSTASWWNDASVRLYAVLLRETRYRQRYLDLMVNHEVRHIFKTRSKVVSFIRKFLDDREFLEVETPMMNMIAGGAAARPFITHHNELNMRLFMRIAPELYLKELVVGGLDRVYEIGKQFRNEGIDLTHNPEFTTCEFYMAYADYNDLMELTETMLSGMVKELTGGYKIKYHANGVTNSPIEIDFTPPFRRIDMIKDLEAMANLNIPKDLASDEAKRYLIEACAKYDVKCPPPQTTSLRPGSLLPIEEPLLELERPPIFSAPLFSSFIVPAQQNKVLLN

SEQ ID NO: 3712 - protein, 177 aa, Zea mays
MVMCKAEGARCRRHRQQGAGVCACCLRERLSHLSLPPSVVRGCGEEEGYRHSRYHEEEASSSCSEVSTAYSSEGSSVASASECASPAPGEPRFHDEVRRAARVSLLMRHERVVGDADAVAAFLLARRRRRTAATSFWAKLLHAARAGGGKKDRGCSLAAPGTKTLEERAAAAKWVLF

SEQ ID NO: 3713 - protein, 234 aa, Zea mays
MDHQDAIVLKLLDAMVLMEQRLTAALAGRDGEQADADGPVSASMVDRELRFDELTFNDESAPHHLTPIHEALFSDGADPFFGEELDILTTSEFDIEQSSVDTRSLRTPPSAGEFERVEDMPGLRHLVVLSDRAVADVFVAYSTLKVFDQMPNPGFDGGPIFDEEPVFEGEPFPSTTDYIDALRNEMNEFKSKRDDVKRMVDAAERQGMEVTSQVRCALLEDAAARIVDEYQVHP

SEQ ID NO: 3714 - protein, 590 aa, Zea mays
MPLRQRPTMGGGGGGVAKMPAGQLWLLLLGVLLLAFGVPAQASRNTHYDFVITETKVTRLCHEKTILAVNGQFPGPTIYARKDDVVIVNVYNQGYKNITLHWHGVDQPRNPWSDGPEYITQCPIQPGANFTYKIIFTEEEGTLWWHAHSEFDRATVHGAIVIHPKRGTVYPYPKPHKEMPIILGEWWNADVEQILLESQRTGGDVNISDANTINGQPGDFAPCSKEDTFKMSVEHGKTYLLRVINAGLTNEMFFAVAGHRLTVVGTDGRYLRPFTVDYILISPGQTMNMLLEANCATDGSANSRYYMAARPFFTNTAVNVDDKNTTAILEYTDAPPSAGPPDSPDLPAMDDIAAATAYTAQLRSLVTKEHPIDVPMEVDEHMLVTISVNTIPCEPNKTCAGPGNNRLAASLNNVSFMNPTIDILDAYYDSISGVYEPDFPNKPPFFFNFTAPNPPQDLWFTKRGTKVKVVEYGTVLEVVFQDTAILGAESHPMHLHGFSFYVVGRGFGNFDKDKDPATYNLVDPPYQNTVSVPTGGWAAMRFRAANPGVWFMHCHFDRHTVWGMDTVFIVKNGKGPDAQMMPRPPNMPKC

SEQ ID NO: 3715 - protein, 384 aa, Zea mays
MEENHTIHPVPTTVPTTRVKLTTKTNPKSQTCVAFQPNQPTPSSSVNPSIRLSLPPPPTKTPNRRGHRRLRPRRAAPRREDVVPLPRPRAVHGRRGGGGRRRRVVAEPSGFSPGIGGEREKAAIAAHPLYERLLEAHVACLRVATPVDQLPRIDAQIAARPPPLAAAAGAAAAGAAAAGGPSGGEELDLFMTHYVLLLCSFKEQLQQHVRVHAMEAVMGCWELEQSLQSLTGASPGEGTGGTMSDDEDNQVDSEANMFDGNDGSDGMGFGPLILTEGERSLVERVRKELKNELKQGYKEKLVDIREEIMRKRRAGKLPGDTASVLKAWWQAHSKWPYPTEDDKARLVQETGLQLKQINNWFINQRKRNWHSNPTSSAEKTKKKR

SEQ ID NO: 3716 - protein, 625 aa, Zea mays
MGCSSSKLDEEAAVKTCHDRKSFVRKAIAQRDLLASSHVAYVQSLRRVSMGLFYYFAEDEHLHRLQESSCVHRPGSPDKVLVVVNCLRPAGAPVHPVVEQWEPTDEAIEAATIDGFFGADGPFLRPPSIDPMFGPSVSPQPRRWDLFWDPFSSLTDHPSYSVEEVRDDQEDEQIPELEEESDGGGGDCHREGEGGAEEEEGEQAAVAAQVAAPSREQVGRKVDHVSNELRVLASAEIEQHGAPGFTVYVDRPPASMAEAVRDIQGHLMKILDTAKEASVLLEVVPYQRRVQPPVPRDDGEEQGAPEVPPEPFELFQSHKESLDRLYEWEKRLYEEVRAGERVRLAYEKKCALLRSQDASGAEPFAIDKTRAAVRDLRTKLDISLTSVDAVSRRIAAVRDDELLPQLLQLVRGLARMWRVIADAHRVMKRTADDSIALLTASAAAAAAARPDPVREGGGTRGPPPPPGVARAAAAAGALGAELRGWRAALEAWAESQRAYAAALWGWARSCVKDGENMPRLIVSWARAVEAVDVEPAARAVDAAAEAAAAVASAAKRQRSGGGEEWFNEDEGKKKVCVGLAAALGAIAEAGALAVFGYDELLLEMEMGAREREREISGRDDECFNP

SEQ ID NO: 3717 - protein, 332 aa, Zea mays
MEWTAPKRAASPPSPPLLWDWGEGPRRAPTGSGLGSSGDAPARRGGREREAKRPRADDGEVRCQVEGCGLDLSRVKEYPRKPRVCEAPTQSPRVVVAGQERRFCQQCNRFHALSEFDQKKRSCRRRLSDHNARRRKPQPDAFAFASARLPSSSFDDRRQISFVWNKAPVSHPFTSPWDSSSELPHAKEIREVSTKVGTITGQVHLDKSYVSNAVPSLTHGKDEPWPMKGPDMSIAASKFDGAPDLQRALSLLSVGACGLPDPVHQTSCVIQFTSASENSGDLHLSHGANSGLASCGDGQHIASQPQAQLVRFTMDTSNSVYEPSFFSVNQIN

SEQ ID NO: 3718 - protein, 459 aa, Zea mays
MGCFLSCFRGGSNPSGDLRDPLVRESRIGDAFVNDEKKLDEATGKLDVEAATDHGVDDELRREANYLKSCGTISQTPPEILDSIPINSEDANECGDTPTNVQQTKHVVVVEENSSELLNSDDHDVLHKQDTDEGRTLRTGSETQPSLEEVKPSCHQNVVRDQSTDSSDSPYPTPLVLRGDIQTPGTVYAAAHKEAWKPGKRARAFIYPVLRPIENKMQWMELKAAESPTVLSPNPPKRRNLSAAGSGDKAHQPPTRSAFAGSSEHGSFPNTYSRAAQDGVMSPDEPKCQNGLEQQDGREELSTRSSGRGKRGVASLSHWLKPSSSSADDGSPDDGSSNFVGTEEEKTRCGANVSDVPFFPAFGLDWEGETDKPTPVLPKAWDGNGIPNTTTKYKEDQKVSWHATPFEERLLKVLSDEKPRHERFVFFSFCYDPACPCRCRELSRVFGVPVWSSAGYWSS

SEQ ID NO: 3719 - protein, 126 aa, Zea mays
MKRLLRRLSRTVSVSVAGEDGGPAARPSSKHKHRRRRKGKKAGAVPEGHVPVCVGEEGGPAERFAVRAELLGEPPLAALLRRAAQEYGYAHPGALRIPCPVDDFRRLLLRLSHGPSSPAPDAMPRA

SEQ ID NO: 3720 - protein, 441 aa, Zea mays
MASAVASSVHAGPAAAGALTFGWLGPRLSLGGRDASATAAEAEEPAAASNAAEPAISKDFIDFEFCLGVSSTTMLPADELFADGKLLPLRPPQAAAARGVERRRDTALVEEVPAAPELSRAARLSAPEAALDLDPYVFSPKAPTCSSRWRELLRLRKAGQTPSASASPPASPAATPSSRASSSSAARSLKLLLQRSGGGRVADLAAAPLLLRDSSDSEASLSLTSSRYSLSSSSSSSGHDHDDFPRHSLDSVDPTPRPRIRLVRSHPQAPQPQPHPPVSASASAPAPAPARAAHSPARRRPSPSPSPPPPQQQQQQASVISVDSPRMNASGKIVFQGLERSSSSPAGSAHSSMRSRSRSRSRVMDRSYSAGVRATPVVLNVPVCSRPVFGFFKDKKEAAAAAARSRSALGRRTTTTTTAAAGGVGGRDLGNGKLTSFVLAD

SEQ ID NO: 3721 - protein, 101 aa, Zea mays
MDRRHRAVPYSARQQQQRFLRPGALARLRDSRIVARSVRSSACLLLPRSAPPSPSPAPPVVAADELAAAPRFLGTTSGSGRYPLRRRVVAARGVAFSPSSP

SEQ ID NO: 3722 - protein, 307 aa, Zea mays
MYFLWHFPAIGCLPTLVTIPVWIGLYRALSNVANEGLLTEGFFWIPSLAGPTTIAARQNGQGISWLFPFTDGHPPLGWSDTLAYIVLPVLLVISQYISTQVMQPPQSNDPNQQGAQAVTKFLPLLIGYFALSVPSGLRLYWLTNNILSTAQQVWLQKLGGAKNPVKEYIDKLSREETTTVQKNDSTVQSEPLSKHSKPQPSQEPKPSGPQRGERFRKLKEEESMRKEVMGQGKQSEQSSSESRVTDGTQNSDVSSGDQKDQQGSHENGPVVASINGGVNHIRNEKTQNLSSEKVCLLFLLTCLPVPA

SEQ ID NO: 3723 - protein, 117 aa, Zea mays
MQKKEKEIVVRTGRPSRATTVSRSCRHHISQALPPRRPASRCAGAPPHSLAARVSPPRHLGVRASERIAAASSPCRHAGARDPSCCRHHPGGRQARPPPPPPPVPFAGIRLEERERK

SEQ ID NO: 3724 - protein, 373 aa, Zea mays
MDRLVVFSRRRRRWILLAAAGAAAAVGAYKIYHHPAVAERRRRLVRLAAAIAAFADAAASSADAVALVTSDLADFVHSDADEVPRSVKQLAKLAASPEVSATVSTLSEAVTSGILRGSGSSSSGPASGGTVALSDRLVDRLFSDSGERLASAVAGSFARHLVLAFYSAPSPQGEASSSPTMWVNVVATGKCRKAISNWVEVFVGTAVREFIDKTIHINTYEQLFEGLTNPRHDAKVKELLVSVCNAAVETLVKTTHHALYSTNGNLGANGSVSGNANGAGEGWVETVSSTLAVPSNRKFVLDVTGRVTFETVRSFLEFVLWKLQDGARKGGGSVVDSGLRVVRYMSDKSMVIATICITLCLHVLNGTRLLVTA

SEQ ID NO: 3725 - protein, 81 aa, Zea mays
MPPPSFASSHRTCAPPSRALSSALRPSDLDGRPQSRCLCRRSGLRLDHDREHHLRSSQRPPPEKGVRWRGRRGSGDEDAPR

SEQ ID NO: 3726 - protein, 314 aa, Zea mays
MPGGPSRSQPWSRARGGPPRPGGRARAALGCTGAGARPRPPLRWIRGRGRALAWRIAEEPAVEPRLRRTAEAGRSGTRRAGMHGCWGQTAPAPAPDPKPRPRPCLEDRRGASRGAAPEEDRRGRAAGHAPRRDARVLGPDHACPCAGSEAEAAPLPGGRAVLCSCPRGGRAGLPARAGWRGRILLTSVHMQSLGSPSRFGLPPPKLPAFSPFPVAPRDASRDSRVRPPDVYKLVLQMPLPPIVIHPLPLPRTTFLGRHQGASARERAGGSYGPWRSTSRPVQPLLTVSARCPSLSHLVGAPPSLGACFLPMVWI

SEQ ID NO: 3727 - protein, 449 aa, Zea mays
MAAGGRSIACFAAVLLAAALLLSAPTTTEAYDSLDPNGNITIKWDIMQWTPDGYVAVVTMFNYQQFRHIGAPGWQLGWTWAKKEVIWSMVGAQTTEQGDCSKFKGNTPHCCKKDPTIVDLLPGTPYNMQIANCCKAGVINTFNQDPANAASSFQISVGLAGTTNKTVKVPKNFTLKTPGPGYTCGRAIVGRPTKFFSADGRRVTQALMTWNVTCTYSQFLAQKTPSCCVSLSSFYNDTIVNCPTCSCGCQNPSGSNCVNEDSPNLQAAIDGPGKWTGQPLVQCTSHMCPIRIHWHVKLNYKEYWRVKITITNFNFRMNYTQWNLVAQHPNFDNITQLFSFNYKPLTPYGGGINDTAMFWGVKFYNDLLMQAGKLGNVQSELLLRKDSRTFTFEKGWAFPRRVYFNGDNCVMPSPENYPWLPNASPLTKQALTLPLLIFWVALAVLLAYA

SEQ ID NO: 3728 - protein, 135 aa, Zea mays
MPTLTKLYSMKEAALHNTPDDCWVVVDGKIYDVTKYLEDHPGGADVLLEATGKDATEEFDDAGHSKSAKELMQDYFVGELDSDPTPEIPEMEVFRKEQDTGFARKLMDDVVQYWSIPAAVIGISAVVAILYARRK

SEQ ID NO: 3729 - protein, 1046 aa, Zea mays
MVAEGARRRVVVEVCNARNLMPKDGQGTACAYAVVDFDGQRRRTATRPRDLNPQWGERLEFLVHDPGAMASETLELNLYNDKKAITAAGSGRRGGTFLGKVKVAGASFAKAGDETLVYYPLEKRSVFSQIKGEIGLKIWFVDDPPPPPAPAAAEEKEAAAAAAGEGKDVKDKAPDAAAAPAAEEKKPETAPSEEKKPAEAKAEEKKPESAEKKDDKKKSPEKGKKDGDKPKEEGKAEKDKKDAAAPPPSPSKLAPPRSPSKKDLAIAGVAGDLEIRPQSAAEKSMAASGASASYDLVDRVPYLFVRLLKAKRHGGGDGQPLYAQLSIGTHAVRTRAATAAGEWDLVFAFHKDSLTDTSLEVTVLEEAKKPAKEGDPVPPEANLGFVSFDLQEVPKRSPPDSALAPQWYTLEGHGSEDGAAVCDVMLSVWVGTQVDEAFQEAWQSDSGGYLVHTRSKAYLSPKLWYLRLSVIQAQDLRLPSPPDAKAKQCGPIFPELYVKAQLGAQVFKTGRVQLGSAAAGTANPSWNEDLLFVAAEPFDPFLTVVVEDVFSGQAVGQSRVPLSTVHRRSDDRVEPPSRWLNLCGGEARPYAGRVHVRVCLEGGYHVLDEAANVASDVRAASKQLSKPPVGMLEVGVRGAANLVPMKIAKDGASGSTDAYVVLKYGPKWARTRTILDQFNPRWNEQYAWDVFDPCTVLTIAVFDNVRYKAAAADDPGKLPRDSRIGKLRIRLSTLDTNRVYANTFALTAVHPVGVRKMGELELAIRFTCPSWLTLMQAYGSPLLPRMHYVKPLGAAQQDVLRHTAMRTVSGRLARSEPPLGPEVVQYLLDTDTQSWSMRRSKANWFRVVGCLSHVATAVRWAHRVRTWAHPPTTVLVHLLLVAVVLCPEMILPTVCLYLFLVLLWRYRARARQPAGMDPRLSHVDSVSPDELDEEFDGLPSGRPADVVRMRYDRLRAVAARAQTLLGDVAAQGERVEALLSWRDPRATAVFAVVCLLAALVLYAVPFKVLLLGMGFYYLRHPRFRGDMPSAGFNFFRRLPSLSDRVF

SEQ ID NO: 3730 - protein, 178 aa, Zea mays
MAHDETGYSKNESYLDGDDGEYGEHVGARPNMDSTTASRKRASTPSPSAETKNASRTPSSGKAGPKLRRSVPRADDMARDCRRSSSLPKSKQHATAMVGRRQHLGRGGFQHGPTGSIFRPLVTTETATLPSTEYGVVYGLCWKHLRALPTQTQRALPRIWIRRAPLLELVSPGEATVI

SEQ ID NO: 3731 - protein, 1115 aa, Zea mays
MARSAAARLLAFSPLLGSSHCHLCLSHPPLLRLLPTCRSKTTSRKPPRSQHRRKVAPATAGSGRPGPPPGAPPCLFQEISELVASVTNGEALRPRRNGSAPSDDVGAAAMGCTEGARGIASGRAAMASTSSAGSIADRVVLGDRADDGRRQSCGTIANTAAFCREAGDTGMTVDSDVDNISAMVHRITGILRSEAPGPPVEQKLESLGANYTPNLVNMVLKRCFKVRQLGFWFFHWAKRLPDFHHTTETYNTMLYIVGEARSFGIMEELVGAMDREMCSKDIKTWTILLSSYGKTRQIGKMLSTFEAMRKSESIWIDSKVYRTVLHALCNADKPELALEFYKDMPSNMEVRTDILRLLMRCLATSDNTIEGVYLIRDDMIEGMKHPEEYCYTEALQSFCIAGKFGEAWKVFQKMKNKLLANSSALENLLRGLCRAGRMDEALQVTEYMKRTSGLNSTMFSFLINGYLRKGEHINALDLLREMREYGCVPLASSYTQVMQHLFATDQCEEACGLFEEMLKNRVEPDIVTFTALIGGYVRSGHISKAWDVFRNINKNVQKPTLKAYTVFMRELCKVSRPLEAVVLLKEMLEYDFRPSERTFCWLISALRDKSYLEEASNVERMRASFNLRNPRDGLQFEQLDGIGNIDKFRKMRKSNPQEKELALEFTSSPSDQNGKTSSFTLSDDTHQKEQEQDYSDGDVEEICQILSSSDDWGSTQQALETRSVHFSPSLVDAILKRCKRNSCAALQFFSWVCRRPYYMPSTKTYNTAMKLAGSAKDFKHMWYLYREMLRTGCSPTVDTWNVMVCQYGNAGLSEKALNTFWDMKKCGFLPDKTTYNHLIMYLTHIKGRKIDVAVTIFQEMCHAGHIPDKRILFMYLLALCECRKIEDATSSVVSLCELGFSVQAVYSIFLRSLCRADRMEEALHLFDCIEKHGCSRDQYMYGSLIHVLLRRDKFEEAVAKLMEMKNEGILQSAHIYTSFIVYYFQKRDVVKALDVLREMKENGCEPTVVTFSALIRGYMAMDMVSEAWDVFQQMKLKGPAPDFETYSMFMSCLCKAGRSEDGLHLIHDMSDCGFIPSTVNFMTVVHGLNVEGKHELAESVLLSKWHLRKQRTISY

SEQ ID NO: 3732 - protein, 750 aa, Zea mays
MASSSSIGINFIQVLEHQTRALFSELDKRLQARDDKWEFRVAVLESRAADSERQLDNVSSDLRTDVAAQISVVEALESIVVDSTQHMDSVSSSIRADPEVRQAAVDATAEDRRHHFEAATSSHITELESTTQVFELWHPRIDSAINHLHPSMVKVRAAIDTRDLQWSPDAHGGGSGGLLGEPGGEPTEISGAAHAGGLPRPHQHPHRHPAIQSVRRRGALGLPRDGRDRPASTTGDEPDQGILPLPEHELLRPRRLHHRQELLPQQLRRRLLPQVRARADLHGPLCSNRARRATGAQHCQLRPGRAAGVPDIWHPTELSFPFLASYLLQLVIREEEGEVPSTLPTQCLMNWFSCSCASVLYDVTKLIKPLPTLAMGVSSIPPPAPLGIQLVLDAMPRGPLLGDVHDKGPWPPPIQFGMHATQRRPIPWPSFSGIIIRRHLLQSLPLVPHCSVNMRKSMFTHCQLSVIHWKHCFEFLDNALSVDCFQSGAPKWDQSSDTHKVSSAEDKLVALCRFRRARGLWEKCDEKWSHAYKCIVDAHLHALEEVWELLVPDPTKTEGQSPEDSSTEQLFMLVSLAAWGGTNVSQTLKFQGQLQNHSVLILIDSGSPYTFLHEKFRAWFQHVDLVVAPLQVRVANGELLHCQHKILQIPWQIQTFNHIQDTMIPSNLDCFGWCTSDAFYKAAEPCGIEEDLQRRREGGVPPRFLIIDDGWQEIVDYYPETLHQMFVANAGSSFKLPGNSVKDFLDSKTA

SEQ ID NO: 3733 - protein, 356 aa, Zea mays
MACLTDLVNLNLSDNTEKIIAEYIWIGGSGMDLRSKARTLSGPVTDPSKLPKWNYDGSSTGQAPGEDSEVILYPQAIFKDPFRRGNNILVMCDCYTPAGEPIPTNKRYNAAKIFSSPEVAAEEPWYGIEQEYTLLQKDTNWPLGWPIGGFPGPQGPYYCGIGAEKSFGRDIVDAHYKACLYAGINISGINGEVMPGQWEFQVGPSVGISSGDQVWVARYILERITEIAGVVVTFDPKPIPGDWNGAGAHTNYSTESMRKEGGYEVIKAAIEKLKLRHREHIAAYGEGNERRLTGRHETADINTFSWGVANRGASVRVGRETEQNGKGYFEDRRPASNMDPYVVTSMIAETTIIWKP

SEQ ID NO: 3734 - protein, 176 aa, Zea mays
MATTPRSIPPAGAEAEGGRVYAGRPICDCDAHGPRAILGQRGPDATGRRQQQHRNSKGSQKRNEASARWLQAACGRVVVRCAANRSRAAPASALSVAHDLRDLVRVRCRWRLPSLPSNSLRLREGNRGPHADAAAARGEPHHTHARARLAWLGSDFGWRRDWTGPDRTAVGDGGVI

SEQ ID NO: 3735 - protein, 182 aa, Zea mays
MECTSSRRRRSRLSRCLLLVCAVASLLCHSPGPAAAAAAPRRLLQTCPGQDFDVPHAHLRARDNVKPLKYTEELSARAAQWAQQYRSDCEAAAPAPGINVFLGAAGATWLPSDAVAAWAEEEQHYDYGSNSCSTGKACGRYTQMVWRGSKEFGCAVVDCDSGKTLMACLYEPQGNVAGQRPF

SEQ ID NO: 3736 - protein, 1003 aa, Zea mays
MQQQAETMGYCSSYTSSSRPVVPSSSLRRLGLVLAAALLVWCQRVATAQQPVPVPVRVGVILNLTPSSPVGQRRKLGIEMAVEDYYAARPGSRTRVALRFRDSAGDVVAATSAAVDLIKNEQVQAIIGPQTSAEADFVAYLCNRTRVPMLSSSATSPALSPAQTPFFVRTAPNDSFQAAPVAAALATFGWRAAVVVYEDSPYGSGILPALAGALQGVGVRIMDRAAVPGDGRIDALLYRFKAMPTRVFVVHMNARLAARFFRRARLAGMMTEDYAWVATDGVGGVVDALSPDDISAMEGVLSLRPFVQMTDRVGNFSARFRERLRREYPSADVYYPHDPTVVMLWTYDTAWAIAAAAEAAGVSSPAFQTRQQSTAATDLDRLGVSATGATLLKAVRETTFRGLAGNFTLLDGQLQPPAYEFVNVVGKSSRAVGFWTPDDGITQTLGADGAKGMRRTIFWPGDSTSAPRGWVVSPNGHKLRVAVPVKNGFKEFVDVGGESATAEHPNITGYCIEVFDAVMSKMPYPVSYEYEPFPDSSESYENIVSLVPEQSADIVVGDVTITASRMSKVDFSMPFTDSGWSMVVAVRTETSTSMWIFLRPLTTSLWLASFAFFCFTGFVVWAIEHRINPEFRGTRWQQFGLIFYFAFSTLVFSHKEKLESNLSRFVVIIWVFVVLILTSSYTASLTSMLTVQKLQPAATDVTELQRTGAYIGYQEGSFIKQRLQKQGFDETKMRSYSTAEEYADALSSGRVAAVFDEIPYLKLFLSQYCDGYTMYGPVYKADGFGFVFPTGSPLTPDVSRAVLTLAEGEEMAQIEKKWFGEPGACPRQSGGGAAAALGASNLSFRSFGGLFLITGVVSSLMLLVYLATFIYRERGEVRPEPEEGGLGSSSVRRLLAWMRHFDQRDLKCPTFKTGNDDCVREGNHRRWVESVRNGRGGNGSVQAAIEEGAIAVGMTPLRFSTSTASETINADSSPASELGTSFGQGILEAPHSVSVEMPGSTAS

SEQ ID NO: 3737 - protein, 149 aa, Zea mays
MEFAILIKILVVPRIGQRRAFVLKKNDVRYRIMVRRCGQDAAVPLSHPYTKIRAWRGPSPTRPGGRHRHRQFPPRIAGGRGRRRLARERLRGRCRMRSCRAEGHDATASRPCYGKSSATGSYPSAPPQTAASPPRGTPHAPGRIAPGEA

SEQ ID NO: 3738 - protein, 247 aa, Zea mays
MAAAAATATTTSPARASWRPTVPATSASAAGVCFRVGAKRFSPGLRTASTCRHRHRGRTRLTTAHVKSGEAEGRPSTEESATGIGGPDEDSLRRELETAIEEEDYARAAALRDELRVLQEDCRAAVLAANARFYAAFKDGDLAAMRRAWARGDHVYVVHPSAGRISGYEMVMQSWEMVCDAGYEFPLQVDLQDVEVRVRGGVGYVTCLEMVRTKGSSSWGKQLATNVFEEVDGEWLMCVHHASHFDE

SEQ ID NO: 3739 - protein, 403 aa, Zea mays
MEEEEGFLHVLRALRDAARRVEAGETRGPALQALLALEAGADDLLAGDPDLTALRRLLCRLRALSCSLDLCASGSLRARCGARRAVARVAGAVAGEIQAWVDREAIARLVAALSSHGLGGARALLAELEARLLSAGGRFDPRLQRALLRHGVLQALEARLGDPAVGDGCAAAVLALVRFNKDVFVGPVLMGPAVGALVASASGSPAPLRALNGLVDAIRSPLVDELHARGELPRLVALLCAPDPRAHGPALGFALRVGYYGRKEVVDALLAEGLVKRLLCLQRSDLGGSLADTDEGEDEEGCPKAKPEDAKTGGFLLVPCLPLVYLWGRRQGDSAADADADTEERPFVSAVARFAVQVEVGVGLSPREKREAKLEILRRVREAAVSPAEEATVLAEVLWGATP

SEQ ID NO: 3740 - protein, 389 aa, Zea mays
MVLETAGGHGRNPNGILGLLCREHFPGLVEYAGVTSPAYTFDHYAVAPDAVDRDGRQFNNKAERVKQELWDFFRCDAGYEARADVVSTTCCKKLVVDMHYEARIQAIVTYHGSVLGEKVNKKDARTMSLTADQYLQCWEKMVQRWCSAEWDEAHNASRERRLLMQGPSHHQGSRSLGKYAEAWSAAHGGAPCSTFSAYAMAHKGKATSDVTYNPDDRPEAYTNPAIHSRLSEYTAMAKEVHGPDYDPRTEDIDGDVLMRVGGGKRHGRYWIADGAIDSSSTPTLSQVRARSTSASPAIRPRQDTSQHRIQQLQTQLDDERRQREELEKRMAEMFAYMQSLGAAQGHAPPPPLFPAADPTEFTTPGQSAASNNPHASSSPSPNQSRCPPR

SEQ ID NO: 3741 - protein, 597 aa, Zea mays
MAEDARGEKKDAYAAAPASKLPAKQRGGFRSMPFILANDFCDRLASVGFTTNLISYLTLQLHLPLVEASNIITNYNGTANLTPLIGGLIADSFAGRFWTITFGSIIYQLGMVCLTLSAALPSLHPPSCAKHAADCQRASSYQISVLYLSLLCTSIGTGGTRPCTMAFGADQLELNAHRHRGAKPKWSFFNLYFFAVELAKLAAVTAVVYIQDNVGWSWGIGVPTVAMVAAVIAFVSGYSLYIRMPPGGSPLVRLAQVATAAYKKRKAVVPDPSLLYEDKELDAGISTTGRLLHTDQLKCLDKAAIVTDGDVLPSGQPKLWRLSTVHRIEELKSIIRMLPICAAGIILVTSASHNHSFAIQQARTMDRDITPHFKIPPASMLIFTNFGMLLTLAFYDRVLVRVLRRFTGRPNGITHLQRTGVGLTIAMLSNVVAAVVERRRKSVAAASGLLDAPKATLPMSVFWLVPQYAIHGIANAFMDVGRMEFLYDQAPESMRSSATALYWLTFSIGSYLGTLLVTIVHDKTKRTGQWLPDNLNRGKLDNYYWLVVALEVVNLVYFFICVKYYTFKPLEMVSGEEVELYHHGNGTDDAKKQGVEA

SEQ ID NO: 3742 - protein, 256 aa, Zea mays
MDPGAGAHYSARTAEEVFRDFRGRRAGMIKALTNDVEKFYQLCDPEKENLCLYGYPNETWEVTLPAEEVPPEIPEPALGINFARDGMNEKDWLALVAVHSDAWLLAVAFYFAARFGFDKEARRRLFNMINNLPTIFEVATGVAKKQNKEKEPNNTSKSNKPSSKMTTRPESHLKATKVAPPKDEDDESGEEYEEEEERDNTLCGSCGTNDGKDEFWICCDSCERWYHGKCVKITPARAEHIKHYKCPDCSNKRARA

SEQ ID NO: 3743 - protein, 768 aa, Zea mays
MEINEEAMAAHKRAFLDFLDQDVGKGVYMQAVRDMVQNKRHRLIIGMDDLRNHNLDLARRVIRTPGEYMQPASDAVSEVARNLDPKFLKEGERVMVGFSGPFGFHRVTPRDLMSSFIGTMVCVEGIVTKCSLVRPKVVKSVHFCPVTGDFLSREYRDITSFVGLPTGSVYPTRDDNGNLLVTEYGMCEYKDHQTLSMQEVPENSAPGQLPRTVDVIVEDDLVDCCKPGDRVSIVGVYKALPGKSKGSVSGVFRTVLIANNVSLLNKEANAPVYTREDLKRMKEISRRNDTFDLLGNSLAPSIYGHLWIKKAVVLLMLGGVEKNLKNGTHLRGDINMMMVGDPSVAKSQLLRAVMNIAPLAISTTGRGSSGVGLTAAVTSDQETGERRLEAGAMVLADRGVVCIDEFDKMNDQDRVAIHEVMEQQTVTIAKAGIHASLNARCSVIAAANPIYGTYDRSLTPTKNIGLPDSLLSRFDLLFIVLDQMDPEIDRQISEHVARMHRYCTDDGGARSLDKEGYAEEDDGDANAAIFVKYDRMLHGQDRRRGKKSKQDRLTVKFLKKYIHYAKNLIQPRLTDEASDHIATSYAELRDGSANAKSGGGTLPITARTLETIIRLSTAHAKMKLRHEVLKSDVEAALQVLNFAIYHKELTEMEEREQREMEMKQQADHDAGATGGTVDGHGSSGNDPMDVDVGSNDQNVSAERIEAFEALLGQHVLANHIDQMSIDDIEQMVNRESTAPYTRSQVEFILERMQDANRVMIRDGVVRII

SEQ ID NO: 3744 - protein, 206 aa, Zea mays
MDSKFDKYWEKGKYNMALVIATILDPSKKMDFLDFFYEKTCQQFIDIQINMSLAKQWFTKFFGEYAKIVQKDTTVSPIVATNTSTLGSPILGKRRLDKEFSQWSQTRGRRLAKSELDAYLEEEFVRTDERFEILSWWRTNANKYPVLSAMARDLLAIPLSTVPSESAFSAGGRILADNRSSMTPETLECLVCCKDWLYEYPNIQGT

SEQ ID NO: 3745 - protein, 458 aa, Zea mays
MEPRRISASPRPCSGRRVVARKRPRQEAVVSSVRKLQRREISSRRDRTFTMSAAQERFRNIQLQEEFDTHDPKENASLLPYLRKRSKIIEIVAARDIVFALSQSGVCAAFSRETNRRICFLNGSPDEVIRSLFYNKNNDSLITVSVYGSENFSALRCRTTRIEYVRRGQPDAGFPLFESESLKWPGFVEFDDVNGRVLTYSAQDSTYKVFDLKNYTLLYLVSDKNVQEIKISPGIMLLIYARTSSSVPLKILSIDDGTVLKSFSHLLHRNKKVDFIEQFNEKLLVKQEGENLQILDVRNFQLTEVSRTEFMTPSAFIFLHELQLFLTFRNRAVSVWNFRGELVTSFEDHLLWHPDCNTNNIYITSDQDLIISYCKADSTDSTSEENAGSINISSILSGKCLAKINTGNSNACKERKKAWKFRNTVSEALEDITALYYDEDRDEIYTGNRHGLVHVWSS

SEQ ID NO: 3746 - protein, 169 aa, Zea mays
MAAAAVAISTSVCTSSRRSTGCPNVRPQARPLLGMPSLRRRLQTALAATGKTPGEAEEQVPAWAKPGADEPPPWEREGGAARGQEARQVPFYAYLLASTITAIAAIGSIFEYTNQRPVFGIVGPDSALYAPLLGFFVFTGIPTSAFLWFKAVQTANREAEEQDRRDGFL

SEQ ID NO: 3747 - protein, 371 aa, Zea mays
MASKQAAAGEALAAQINGMSRPEMYDMMSKMKTMIDHDQETVRRMLVDNPDVTRALFRAQVVLGMVKTPKTTQALDMVQPTAVPTAPSSVKTTAPDHVSLPPPPLPANQQSVAQLSAPFSSGLSNVGSTMDPPTISANPPQSAQAKGYLIHQMPSSAPQPSQHPNMALPHAPPQYSNVPSHIPIVHSQPQQPLQSPAIYNQQLQPPLPQLSRPPFPHQMHSQVPNSFGLTHANAPQHMLQQPMFHPVANPQTNFLPGQPPLPSQPPPQQLYQASSHYNTQNTTPMQVDRGAPWGRAPDAPTPGSHFPGQLPGLPGQMTQGIGGIQAGQAPLTPEMEKMLVQQVLGMSAEQINMLPPEQRQQVLQLRDMLRQ

SEQ ID NO: 3748 - protein, 483 aa, Zea mays
MAWSSKKVCVVGAGVSGLVSARELRREGHDVTVMEQSGGVGGQWLYDPRTDASDPLGVAGAHSSVYASLRLNTPRESMGFSDYPFVYPAGNDDDGAGGDARRYPGHAEFLRYIRRFCDAFGLMDAVRLNTKVLHVAPSAPRGHGDGSVTRWTVRCSSRHGDCDGEAVTTEETTFDAVVVAVGQFTQPRLPVINGMDKWSRRQLHSHSYRVPDSFQDEAVVVVGCHASGVDIALELRAVARDVHVSVKSVDDGVAVSPGMRKAASRHHNLHLHPQIERLCEDGQVTFADGSRVVADSIVYCTGYGYSFPFLDTGGLVTVDDGSRVGPLYEHTFPPALAPSLSFVGVPKRVVVPRFYETQARWVAEVLSGRRALPSSEEMMRAAEGYHHPAREMMVAGVPKHLAHDIFDDYDYCDEFGEKHCGFPRLERWKKELRWSSIARQRGEGEGEGEDSESFRDVYRDSDLVREGLQAQGWPWPAGSHQHK

SEQ ID NO: 3749 - protein, 272 aa, Zea mays
MACGNVLGFGVHGKHTKQVAETGSAKKAGSQLKSRIVAEKPVAECAQLIEQLEDQISIIIREEKVEREARKAEMEIAKAENMIAHKDEIYSRPKRTWFATEREKKLLVAAAKESLGQGKSTSGIISAKQAEDLRLKEKKRREHEKDLPRKKRRRLEAQREMLEDEDEDDEEAKESDRGKKLKKGQSLVDAAYRKAKSLKAASKRGPGASKGKKEKNARQYSEKTPNRHEEMRELFQNDMSEWKQGRSSKKNNNFAHKKSKAFNSKARYKRRK

SEQ ID NO: 3750 - protein, 879 aa, Zea mays
MACHLCPLFNLQLLLLLGAVLGNADLGRGGGAEASDRAEPDSYLILMWHDYSPSSPPLPPPPPDPPSPTATCEGDLHGKWDFHTRCEVSEEVELDGDVYITRNGSLMLLSGASLTCEKYGCVISANFSGEVRLSRGVCVTTGRVSLVATNITVAETVVVNTTALAGDPPDRISGVPMGTHGDGGGHGGRGASCFVKQGQTQEDSWGRRCLCMMRGAVVLAAKHAKTMVGKPLLYGIGTLLVMPLRTLYGVGCVFGARWFLYNMTSVSPSLQIEFKENTRSGTNEMSFPIRILSDAYVVVELSSIDSSHVLVSRILLGKLPDGNCKMSRDSILAAELPSAYSRFSWKGLSPRDLLCSFCRLQRLPEPHFDVSRVSCDTLMSALSSEERGAPAGSAENQYTNDVRINKEKPDLFKCEVNIRSRKQEILLEYSAADTWSKESNAIQNSSLKVLIWFNNYFKKLTSKTGKLYLSESTAGVKVHSNIFLQEFAMCLPVYGKNGGSYSAMCSAVGSFSMDTQKKHLESTAKLTRIEGPDSGVFPSHGSLTCISYTASLVTKDKAKTYLLESHNEFEFEIGTGAVSNQLESCVTQLSVNQTARFVAELPPRDLIMAASCEFSHDLSNVSSESCFLEFSVKVLQVTEPLEDRMEKALFSPPLSKQRVEFVVRHINELHVTTLVDFGCGSGSLLDSLLEHPTTLEKLVGVDISRKGLTRAAKSLHQKLSKKSTTQTNVPTDVLYDRSITDYDSRLYGFDIGTCLEVIEHVEEDQATLFGNVVLSSFRPTMLIVSTPTTNTILSSRVPQSRPQVRVDQATVQCWATGLAVKHSYSVEFSGVGGLGEEPGYASQIAVFRRLVQGQEAMCLDKDGDQPYEVLWEWPNACVN

SEQ ID NO: 3751 - protein, 38 aa, Zea mays
MWFLKTEDKLSSLEKVLQYITSQTSLEKVLQYITSSEN

SEQ ID NO: 3752 - protein, 201 aa, Zea mays
MVEASPESGAAATGGASSTAAVRKGKSCKGCLYYSSVLKSRGYNPICVGIPRSIPQVPNYVVDEPKEEATAQGHDLRRFRYGCAGYSMFVDNRDGQGGESEGKTLLPYCRGLELLVDSRLVERKPSATEQAPAHVAKDAAATIRSHQQGQQRPQNLSRQEFLDRKRSAGLVASGVAKNLNKTANYIKENIQDMYTDRRPPK

SEQ ID NO: 3753 - protein, 154 aa, Zea mays
MCRQLEYLVRDCLIQIILLHFRRGLCVQTTTVEYSYNWSLWPSTVWMLSFSIEQSQSLVTVFNHVLDRMDTSVKCVTLHSEFRSTPLIGSNSLLLAYYLTFLFAVSIIAETCANQHLLTQSICWHHFIDRIHPASCFCFALLTCFYCCRGLFAI

SEQ ID NO: 3754 - protein, 568 aa, Zea mays
MAFRRVDPEPFLPPGFSASVVLHREIMARSVSRRLPPLHEDWAIISIQPLPDHEIAFPAVRDVVREYLVEHRRLGVRDIQRSHLGQVLVQFSSILERDNLVLLGPQQYLDASFTVQRHNDAWNHRALYFNRECWLMLLGFPLDYRSSEHLQVAIGSFGRLILWEEDRRNIYRTLLRVRVTSLEEVPQFIVFSDADGFLGDSWTVQCEIIQQTLLGGQPQDDDPVPAAPADGQQLPFEFFGLGQPVTAVGWDLNFPPDDNVQAQPADNIQGDWDQWIVNDPPVQPPLQPLLDQPPDEQQVSNPHSDLSSDSSSGHIHGALLQNGQLLNGKIPEDPVAVGPVPNFNAPADHPMIGPQEVDGPPMQEVPPVPGDIVIPDAQPVEPLVNGHNNVGLNFMFSPGWHSDPVLLSHLERKRNAQFYRIWEKFFAPADYSATSVQVSKKWAPFFLSNLMHEDSFSWSKKFLSSDIPSALLEPESMSLPFVIPRKCPEDKFLDLAVSEESADDTSVPSDTTSSKPNIAIVESDLRRSKRLHDARAGFRQGSCQKKNCLMCQHKCEGPPRFQLKLSGA

SEQ ID NO: 3755 - protein, 130 aa, Zea mays
MARGVVSAKGGAVAGKKKGSVSFTIDCTKPVEDKIMEVASLEKFLQERIKVAGGKAGNLGDSVTISREKTKVTVTSDGPFSKRYLKYLTKKYLKKHNVRDWLRVVAANKDRNVYELRYFNIAENEGEEED

SEQ ID NO: 3756 - protein, 467 aa, Zea mays
MRRYSALPNGGRQETLADRAHRYRGVVLVILAPLALVSLVLLLMPRSPAGTMGGARRSGPAGADRYAVIFDAGSSGSRVHVFRFDANLDLVRIGSEIELFVQIKPGLSHYANDPREAAESLVSLLDDAKRVVPAELRDQTPVRVGATAGLRNLGAQKSEAILQAVRDLLREKSSFKNQPDWVTVLDGTQEGAYEWVTINYLLGNLGKTYADTVGVVDLGGGSVQMAYAIAEKDAEKAPKPSDGEDAYVKKLFLKGTTYYLYVHSYLHYGLLAARAEVLKAGNGNGYSNCMLEGFQGQYKYGDNSFEASASPSGASYSKCKDDAVKALKVDEACTHMKCSFGGIWNGGGGAGQNNLFVASFFFDRAAEAGFVNANAPVAKVKPSDFRQAAERACSLSVKNAEATFPGVQKDNIPYICMDLVYQYTLLVHGFGVDPDHEMTLVKKVPYSGAYVEAAWPLGSAIEVASSS

SEQ ID NO: 3757 - protein, 2295 aa, Zea mays
MPEQGSGVDHTQSKPRVISNVDDDDGVVFEDDADENEGYLFAGQYEDTDEDIEVDGSQDESTATDVPDPYDKVYSNIPEETHMLKTVPNCGYCTAKKFEYETPGFCCRGGKVELAPLETPPQLKRLWDSADSDARHFRDNIRFFNGHFSFTSLYCCLDSMTTNVRDSGIYTFRAQGMMYHNIKSFGRDGGAEHKHLELYFYDDDPTLEHRYRKCREEHQQKDKEVIRQIVDILHGNPYSEHLRTMGHVENLDDYRIALNLDQTLNQKTYNTPLTSEVAAIWIEGSEGRGQFSKSVMLHGKDSSSHCIRSYHGCYDALSYPLFFPRGELGWHANIPKVGVSMDEVDAYRATHRASNANDEDAESPSHLCVSVRDYYCYKFQIRPGVFNPILHGKRLFQQFAVDTYIKIENSRLDYIRKNQDRLRADLYQGLVDSMLDGDIRGEKVGKRTVLSTSFIGGPRDMRRRYMDAMALVRKFGKPDIFLTMTCNPNWDEIRRELLPGQTPQDRSDLVVRVFHAKLQELKHRLTKQDILGKVRAYVYVVEFQKRGLPHAHFLLIMQRKYKLTCPEQYDLLISAEIPSNKYPELRKMVIKHMMHGPCGSLNPNCPCTKGRKSCKNHYPRPFSDTTLQGKDSYPIYRRRDDDRKEKVRGCELDNRWVAPYNPYLLRLFNCHINVEACGSIKAVKYLFKYIYKGHDRASVVMRDASKADDDVDEIKQYRDARWVTPPEALWRIYGFELSQISPPVMQLQLHLPNMHMVAFHERQMVERVVNRPGVDRSMLTSYFEANRLHEEARGILYRDFPEWYTWQSGKGKVWQQRKRDTGGQVGRIVSAHPAEGERYYLRVLLNHVTGAASYVDLRTVDGVTLPTFREAAERRGLLESDNTLDECLTERALFQMPSSLRRLFATILVYCEPSDVAVLWQKHKDSMSEDYQHKSQNKTHVEQMVLIDIRNMLQSMGKDIKTFPLPPMIDAYDDAIGTAREVYEEESIQPTVEDVALKDSLNEEQRAAYDKIMSAVDTDQGGLFFVDGPGGTGKTYLYRVLLATLRNQGKIAVATATSGVAASIMPGGRTAHSRFKIPLTIDDGAVCSFTKQSGTTELLRKASLIIWDEASMTKRQAVEALDNSMRDIMGRPALPFGGKTIVFGGDFRQVLPVVRKGSRAQVVASSLRMSYLWESMSHLKLVSNMRAKNNPWFAEFLLRVGGGTEETNSDGDIRLPDDVCVPYSGSDNDLDNLIDFAFPNLNENMSDSTYITSRAILSTRNDWVDMINVKMIDRFQGEHMVYHSFDSAMDDPHNYYPPEFLNTLTPNGLPPHVLKLKIGCPVILLRNIDPANGLCNGTRLVVRGFQRNSIDAEIVLGQHVGKRIFLPRIPLCPSDEEMFPFQFKRKQFPVRLSFAMTVNKAQGQTIPNVGVYLPEPVFSHGQLYVALSRATARSNIKILVIPAVDGRKKSRKGVKKTPTVDCGTYTKNIVYKEEIPCEPRVEVVLIDDAFVERKWMECLFQPSAYLGDEVIDCYINLIKAQKHLKCRSGGRVHIENAFQFNFLKRDGDLEIKTEELYPIKDMAHICSAERRVLLYLDHDMIKGLQRQIDMISQCKELKDHRWPDLQVASWPLREIDMGYAKQTDSSSCGLFLLNYIEYWTGDELSDSFTQDDMSHFREKMAAILLSSDLNKRRGCLLYKNEKEVDSGSPSDVEILENPTDSNKRKLLHVLDDSEVVYEDEEGPITQADLQRWFVDDWDKRAPVKVSTDGCTNDFLMVGLSTKDMPVTKADSIDVLCDYIMAIEDDTTLECFDMAVRLLANKESRRPKEEIINNRKHYMDMRFWRMVGFGKLPKYHQDPTTEELAKTLDCWPSMNYYITGCRYVLMPWKFNGCHALFVIDHVKKHVTFIDFTPTQDWCKHMPYKRFAEAIIMASKKYKIAYSKKRSGWAEDIFKWEHTIQTGVPIDLRGFNTSYLVLQAMAMWGNDRRLKFVGVAQLYSGLVKVPHDVTGCMITARKRMPVTAGDMHSRYIPQQDYFSEGLYTFDIGQNDLAGEFYSRTEDQVIVSIPTILLEFENGLKAVISSRRLSNYLSTPEHHSSELNASADLLNHHFKRYTKKPDALQKGISPSDDAFTLGIAPALAKEHLLNAENKGLLCRDVSPDGFRFFSNLFKVVFVEATEAQYAFKKLLYTRYKDTPLYLECAPENILSPTSAPVDEEVKNEDGKHILTKANIDQTVEGVSAEDIDPDRVEVASDALQKGISPSDAAFTLGIAPALAKEHLLNAENKGLLCRDVSPDGFRFFSNLFNDIDPQNIHS

SEQ ID NO: 3758 - protein, 133 aa, Zea mays
MARLLRAAAGLALLLAVLAPAASAGGDLAQLGAAVETRRGGGRTTCRGGTVGECMEYLDVDAEGEADVAGMATGGGGGKRRVLQGGSGYIGYDALRRDNVPCSQRGASYYNCQPGAEANPYSRGCSAITQCRG

SEQ ID NO: 3759 - protein, 513 aa, Zea mays
MGDNYDDEGEPIVNLDEREPSPEHQPYEDLDDDLDGGGDWTRDRSPTPVHGDDGGAGSSSKPRKRLLKKGGGGGMPGDDGLDDFGLEDEDADPSAEARKRKGSSSLRDLARGGAGREKKAKKMRMEDDGRGRDTGMVRDRRGSGGRDSGGRDDQDDGEREIQELWDTIAGGESEDDQEGVRTVDDDNFIDDTGVDPADRYGSDNERHSPGRYAQAEEGEEDDEIERLFKGGKKKKKKNDRPRADIGLIVEQFIAEFEVAAEEDANLNRQSKPAINKLMKLPLLIDVLSKKNLQQEFLDHGVLTLLKNWLEPLPDGSMPNMNIRSAVLKLLTDFPIDLEQYDRREQLKKSGLGKVIMFLSKSDEETTANRKLAKELVDKWSRPIFNKSTRFEDMKRYDDERAPYRRPQMKKPSSSSSGMESRDDDLDADFSQRKSGQSSSRQHASRPEASPLDFVIRPQSKIDPEQIRARAKQAVQDQRRLKMNKKLQQLKAPKKKNLQASKLSVEGRGMIKYL

SEQ ID NO: 3760 - protein, 758 aa, Zea mays
MARYSGIFGKPRVNDIKLGIFSKQLLFFTLFLSSAGNRYGGGKISASGGDGLAGGGGGRVSINVFSRHDDTQIFVHGGRSSGCPDNAGAAGTLYEAVPKSLIVSNNNLSTQTDTLLLEFPNQPLWTNVFVRNRAKVAVPLLWSRVQVQGQLSLLSGAILTFGLTGYPYSEFELMAEELLMSDSIIKVFGALRMSVKMLLMWNSRMEIDGGGDSIVATSLLDASNLIVLKESSVIHSNANLGVRGQGVLNLSGDGDTIEAQRLILSLFYSIQVGPGSVLRGPLVNRSSDDVAPKLNCEADSCPVEIIHPPEDCNLNSSLSFTLQVCRVEDIDVWGVVQGTVIHFNRARSVTVHTSGTISATGFGCRSGVGQGKMLRSGVCGGGGHGGKGGNGFYKGDLAEGGAIYGNADLPCELGSGSGNDSTELSTAGGGIIVMGSWDYSLPSLALYGSVESNGGSYASGSVGGPGGGSGGTILLFVHTLSLAESSVLSSVGGFGSTGSGGGGGGRIHFHWSNIPTGDEYVPVAAVKGSILTSGGVSKGLGYSGGNGTVTGKACPKGLYGTFCKDVNRAKGRFFFQAFWVKLEGFHDTVALAWSSVAPGPCPFVTLSRKLQATARALQSWSAKTVGCLKLQLEMARELLHMFEMAQELRVLSPAEGWFRRALMKRILALSSWTRSVARLRSRVTWLRVGDANTSLFHAQARFRKKKNFIASLTTAEGEVLTSHDDKATALFDFYDGLLGTAFQRDVSINLDEFGVAVL

SEQ ID NO: 3761 - protein, 85 aa, Zea mays
MDKERAWVGEEGTWVAEEREQGRGARGGGGHGAGSSVEDGAGRRLETGRTGGGETHTPTSAAPPPPPSTPTVGISPAIGIGARVV

SEQ ID NO: 3762 - protein, 764 aa, Zea mays
MGDIRDWMYEGFKKGGCHTSEWFVKTQMFLDHAAALSQIDNIRCPCNKCRNMTSHTKRQVTLHLCSHGFVPGYKVWYLHGEDVERAAEVEVDDGEDDVDRMDQMLEDLQPELAPDHHDSPTPEFGEEMNLNDDLRQLSIGSVTAKSYGRYDVNGYRFRSSIFESSHPMAATQNSGVVTRATDMEGHEACYYGKIKNIIEITFAGNKPLALVFFECKWMPPKSKKSVKGLFKGLGLFQGSSSSSSRRRELLSAVHGDEDEQHTEEQHIEEEQHNEAEQHNEEVEHVTWDQAAQHHQPWDQWDHQREQQQAWDQWGQQGEPADNPMDDGSGGSSATRTRRSRKSHSVKPRHAIEREADRTLIMPHGDRNWEDLSFDGKGHHTQVNLTLGSLCRLHYPGIVKVSNGDTEDEVLVSTWDEYKFKKERNHTDRQGLVRNDFWLRYRLPDGEDYMGHAERALQNNAKKLVKDAIYYARIQATNLYFQKHPEEAGPLNKKEGSSKIYLTEDQYREVMVPWMAPVPDAVLFLVSILGFRRLPESEATSGQKPSDIEVYQEGHKGPDPNNPDQLCSQTATDRLAAYGEEMVRRHGPDYDWRHEPVDPSVVYASGGGKAHGRYALFDGFIDSSSVRSQRTGSSSRSSCSRRPNEQELEIMRMREEMRQQREFMEACNAHNQAMYQLMQQQGMTSNFPPPPQWSQFANTPVPPPQFTTPPTHIPAPGDRVTPEAGGSGSDPAAGTGFVDSLFAFPPPGGEGGSGQSSNHPSGGYL

SEQ ID NO: 3763 - protein, 239 aa, Zea mays
MEVEADGIQEATAGAGDGGGVDDVFFCVAATSRGNKNSISYFHTNAVGEDAESALALAALCLDHAPDHHRWHHHTVAGAKTFAFLSADDGRTYFAAADPSPGAAEVVRFLERVRDACDAAPRKRLRDEAVAPVARQFARTLRAAAAGPSSGAELPEASLQAKEPSTPLAPVCEKDEEERQRAGERRRAFLQPEESASALPGWRPWWRHASVVIVVDVVLCLVLFAVWMGVCKGFGCLTR

SEQ ID NO: 3764 - protein, 170 aa, Zea mays
MIHEACPSSGTEKEKKKNMMKRWCLIPASTQTDAEELLLFLHTMILRLGCRRSMRSMGSSHLPLRQLLHLLPGGRSAMGWRRGRGRATQAAKGQRSFFLECAAESRAAPPVRPANPRCRSRKPGTPPVQPRQARHGAEAMAAFSLRSCLPIRPTIPGSIILVFDARLARV

SEQ ID NO: 3765 - protein, 81 aa, Zea mays
MCSKVYPVMEKTGDSRCVLKSTTLPHHGKKENRDVLFHTPLSLVFLDASIYSSIRIPPNRAGDYSFELIMSRILSANWRKP

SEQ ID NO: 3766 - protein, 364 aa, Zea mays
MPCVSFRKRLSTLPLSLAFHSIPAGVRACVAQVPNAPPGGASAPPHSTFTSTNTNSLAASSSHATRRDARRGAVQKVDWVGVAGSVVQLLPLPQHQRRTGQAEKKQTRRDLSRSVLLPAPAAVPLLPQFSRPLLPSVRVQIPPPTDPAPSSMAGAGAKAAGALALALVLALAGANSEGDALSALRRSLRDPGGVLQSWDPTLVNPCTWFHVTCDRDNRVTRLDLGNLNLSGHLVPELGKLEHLQYLELYKNNIQGTIPSELGNLKNLISFDLYKNNISGTIPPALGKLKSLVFLRLNGNHLTGPIPRELAGISSLKVVDVSSNDLCGTIPTSGPFEHIPLSNFEKNPRLEGPELQGLAIYDTNC

SEQ ID NO: 3767 - protein, 882 aa, Zea mays
MGPSSPALAPTATELQSSATARSARLRPSPAPAGCTKSDPTPPPPPAPPARPPVSQLPPPPPSHLPPARPSDPTACRAPAAPYQTKRVRFAFTASTTPPRIHYPSAVSRSHSATPAPTAGSKPPSGSCDRIEDEDLEGWTTIRRRRGRAARAGLGCAPAAPRLLSAHAPSRLMVSLRGKCARCLSRDHLAINCRDPVKCIKCKRSGHRSWQCSWIVSRPTTIPQRQPPCLDFHNFPPLAAPSMALPGDPALRPDHSWTTTSATRVMESELERLSSHAVVVWLSCDRPDISLDRVERAFCSRFGVRPVDITVSRSPPADFLVIFAHRHHRDAAVAARDFPLGNLDFRIRPWQLITLGERHDLSFHVRLCLEGIPPHAWNESIAKRVVARACVLDYVEDDCLSSTMKDARCLNLWAWTENPSDIPKVIWLTITGSVMVIHEGVPPPVGQCGLTFRVLVHLDLVEGPPGRDALPTTRSLTWRHGVVDGERVRRDRHDPPPADLRNDRRNRDRDDEDEGDERRGRRQHNGESWSSRLFRSLSRASRGPDRSVSRREQHRDIGSRNGGRHHHLGLGSAPQPLEKRHVRGHSRERHTHRHQEHRHRSSPRSLRQLPVIPTGIRRRCNQASAPCFEKDRKPSPQSPLLRTTGEGGAEGSPLAGQNRSSPPHLCKSLGLLSSHGARRYLPGRVYRRRAYPTMPVPEQCPPSPATLNETPTEASTPETIQTAPSTEADSMDDAPNGSGLEEAPGLVDAAAGLEPEGIPPSLSASFINNFTRPAAQPLLHQHQQAPSNPKKRGRHGVRPVRRSKRLAAVVWPRGNIQERARQVLMKRLGILPSIGQPTAAANGEAALEHYINLFKGPLTTVALQALLPLCGIIPQGQTVQGS

SEQ ID NO: 3768 - protein, 731 aa, Zea mays
MPNKQKISKSSCRDDRHPPPPPPAAAAATGATPIGGGLKNMAAASASTRQATAEACSSHVHHAHLAALLNASARLPPLPLSRLHLPLSLPTASRLVASFPPLPLLVCFLRALRLLPSSPPRPFDSLIKSYASLPNRASLAAAALAFARSAGYVPSVLAYNAVLLALSDASLTSARRFFDSMLSDGVAPNVYTYNILVRALCGRGHRKEALSILRDMRGAGCGPNVVTYNTLVAAFFRAGEVDGAERLVGMMREGGLKPNLVTFNSMVNGMCKAGKMEDARKVFDEMVREGLAPDGVSYNTLVGGYCKAGCSHEALSVFAEMTQKGIMPDVVTFTSLIHVMCKAGNLERAVTLVRQMRERGLQMNEVTFTALIDGFCKKGFLDDALLAVRGMKQCRIKPSVVCYNALINGYCMVGRMDEARELLHEMEAKGLKPDVVTYSTIISAYCKNCDTHSAFELNQQMLEKGVLPDAITYSSLIRVLCGEKRLSDAHVLFKNMIKLGLQPDEFTYTSLIDGHCKEGNVESALSLHDKMVKAGVLPDVVTYSVLINGLSKSARAMEAQQLLFKLYHEDPIPANTKYDALMHCCRKAELKSVLALLKGFCMKGLMNEADKVYQSMLDRNWNLDGSVYSVLIHGHCRAGNVMKALSFHKQMLQGGFAPNSTSTISLIRGLFENGMVVEADQVIQQLLNYCSLADAEASKALIDLNLNEGNVDAVLDVLHGMAKDGLLPSPR

SEQ ID NO: 3769 - protein, 1208 aa, Zea mays
MDPVVLNRERAAADRPKRMPMLFDDYRDEDFYGLPRKYNIVARVEVKFPIEPRYRDSQHFILSDINGSKIEAMTSSYETVKHFDSLINEKHVYKMHNVEFSINLGDCFRHISGPMELYLTRQTVVEPYTVPFQMPPFPKHIFLNLAAIAELPNRTLVDIMAIVVHLDKVQHTMWGNVRKIVVMDARWSLHTIKVWGDLLNKNALCWALANENYGIIIGTMFRRFRRQEYLESSDYTAIHFNPYHHSTHHFEPIRKALMERGHDRQFAITFLEEKRWDITLVTNHSQTSQTPSFEERKRKRDKERYDAMSVEQKNEKNKNRREARQRNKALSIKPNSSRDIYEEDINTNQTREAVNVEIFADVHLGSLSFPDNCSTIDFTHSATNPTKNISLVGNSIKQKIQRARERRATLSVEQRNMINKKRREARQRKKGQNVQANDIVPTIDLLTPGSVHETVSGSGETHLGVVESMHEHHRLCNQTPRRKEGKLEYIRKRRALQADTLNPVSLAIEDPTYTSVVVHPTAYATEHDTIGDAGEGDDWTQPHTTAEITNIGDDDDEGIIFEEDDDENEGYLFTGQCNYDEGTDEDINIHGTQDESTATDVPDPYDNVYNNIPEETHMLKPVPDCGYCTAKKFEYEPPGFCCRGGKVELAPLETPPQLKRLWDSTDSDARHFRDNIRFFNGHFSFTSLYCCLDSMTTNVRDSGIYTFRAQGMMYHNIKSFGREGGAEHKHLELYFYDDDPSLEHRYRKCRADQLQRDKEVIRQIVGILRGNPYSEHLRSMGHVENLDDYYIALNLDQTLNQKTYNAPLTSEVAAVWIEGSERRGQFSKSVMLHGKDRSNHEIRSYHGCYDALSYPLFFPKGELGWHANIPKVGVSMDEVDAYRAIHRASNANDEDAESPIHLCVSVRDYYCYKFQIRPGLFNPILHGKRLFQQFAVDTYIKIESSHLDFIRNNQERLRADLYQGLVYSMVDGDIRAEKVGKRTVLSPSFISGPRDMRRRYMDAMALVRKFGKPDIFLTMTCNPNWDEIRRELLPDQTPQDRPDLVVRVFHAKLQELKHRLTKQDILGKVRAYVYVVEFQKRGLPHAHFLLIMQRKYKLTCPEQYDLLISAEIPSNKYPELRKMVIKHMMHGPCGSLNPNCPCTKGRASCKNQYPRPYSEATLQGKDSYPIYRRRDNGRKEKVRGCELDNRWVVPYNPYLLRLFNCHIN

SEQ ID NO: 3770 - protein, 501 aa, Zea mays
MHPRCPVLDFPLPMPEMKAATALGSWLLPAAPAIRPTLVNLRSRGFCSHGYFPSASRISCSSELSDSDRGLAKEMESEFSDEICAENGAEEDDETEDLIWSKEEIDAISALFDRPMRQKPLKPRNPARQRALPLPLPHKTRLPVAPAPKQHVRLAARAGLSSRACFSDQVRKKPEFLLGIAREIAALPPEHDVSTVLDRWARFLRKGSLSLTIRELGHMGLPERALQTLCWAQRQKAVPLFPDDRVLASAIEVLARFERLRVESALEQCVPTASRAVLEAMASGFIRAGKVDRVRKLLELARINNRTLHPSIYVKLMLEATRTPEGYGLASALVDELGERPELELRPQDCTAVMKVCIRLRRYAAVESLFSWFRGAIGSPTVVMYTTVIHSRCRDGRHREALSLVWEMEQAGCLLDLPAYRVIVKLCVALHDPGRALRYLSRMKEAGFIPTGDMYDSLIEGYLADGRLAKCRQLIRDAESAGVKLDRRLLSRLSETGGRHP

SEQ ID NO: 3771 - protein, 397 aa, Zea mays
MDFSAGGSGSGGGGGGAGDGRAQAERWLEIAEKLLAASDLVGCKRFAERALEADPLLPGADEILAVADVLLASQSMGPSGHQDPLAILQLPPGVNPDQASVSRAFRRLALLLGPRNPHHGAEMALRLVNDAYAFLSDPSRRPPPPANPATGTPSSSHYAAAPAPDPREFWTACPFCCYVHQYPRDLVGRALKCPNEGCRRGFVASEIPTPPTVVPGTDMYHCAWGFFPLGFPNAADLGANWKPFYKAFPWNTAPSGQGADGRSHGNRGGRQAQNDSARGGSSRGRIKKTTARKKVGAGLRRRSLGGGVESGIDSSMLGQEGWAGDEDGGDGRTEEVRGININEAAQATDGTGRVNVSGAGGVEDMGNFHIDVDATEDILGNLHNLPFLRVDNLGRMI

SEQ ID NO: 3772 - protein, 196 aa, Zea mays
MEASSLALVAAVLLLSSTLAASDFCVCSSDQPTAVLQKAIDFACGPQGGADCTAILQGGGCYSPNTVAAHCSWAANSYYQNNKARGATCDFGGAAAVSTTDPSFSGCTFASSATSAGAGTGTAGTTTGTTTAGGATTGTLSPGVGIGGLNGTGMGGSTGLGPADNTLDAAAPGLLPGAASLAAAAAALSLLALLQH

SEQ ID NO: 3773 - protein, 198 aa, Zea mays
MAGSQSQAMLEKMELRQSYRNVWHTDLTNAVAADLPWCCLSLWCGPCVSYMLRRRALYNDMSRYVCCAGYMPCSGKCGESQCPEVCLATEVFCCFGNSVASTRFLLQDEFNIQTTQCDNCIIAFMFFLQQLACICSLVACIVGNSELSEAAHVISCMSNLVYWTVCSCMQTQHKVEMDKRDGTLNTMSAPPMQQMSRW

SEQ ID NO: 3774 - protein, 523 aa, Zea mays
MEADAAAASGGLALLPAVLLLVALSTLVFSTWSNRNSRLPPSPMALPLIGHLHLIRPPPHRAFDRILARYGPLVYLRLGPSTHCVVAGTADAARDLLKHEASIPERPLTAVTRHLAYDDAGFAFAPYGPHWRFMKRLCMSELLGPRTVDQLRPVREAELAAVLEAARQAAAAREPIDVSRHLISMSNNAIMRMVASALPGHMTEAARDCAKHVAELVGAFNVEDYVGLCRGWDLQGLTRRTREVRDKFDALLEIMITGKEESRRRRHATTDTGGGTKDLLDILMDAAEDANAEVRLTRENIKAFVLDIFTAGSDTTATSVEWMLALLINHPACMDKLRAELDAVVGASRLVGEQDVPRLPYLQAVFKETLRLQPPAVFAQRETIEPVHVRGYVIPPKTSVFFNIFSIGRDPGCWEDPLQFRPERFMPGGAGAGVDPKGQHMQLMPFGSGRRACPGMGLAMQAVPAFLAALVQCFHWEVPIPPGQSTAPPLDMEEAAGLVTARKNHLLLIPTPRLNPLPARAAT

SEQ ID NO: 3775 - protein, 596 aa, Zea mays
MGHNVGRKPFTDISNNIIRGDQNELLGPMVDAKERKRKRDRERYAAMSIEQKNEKNRKRREARQRNKEHNVMPNVSGGDQNEQLRLYNQTPRRKEGKLEYIRKRRALQASTLNQGSIAMEVPTYTSEVVHPTAYVSEPDSSSDNSCDWVIPEYTSTPFMPASTQTEDVGSPDMSTEPLRRKHHVLRGERQAILARQNKKFEANIARNVATLTEDTISDVGQMDDSTQPGSTIEINNTVDDDDEGVIFGEDNDENEGYIFADEDTNEDFEIDGTQDQSVVTDVPDPYDKVYSNIPEETHMLKHVPDCGYCTAKKFEYEPPGFCCRGGKVELAPLETPPQLRRLWDSADSDARHFRDNISMTTNMRDSGIYTFRAQGMMYHNIKSFGSECGAEHKHLELYFYDDDPSLEHRFRKCREDQIQKDQEVIKQIVGILRGNPYSEHLRSMGHVENLADYHIALNLDQTLNQKTYNTPLTSEVAAVWIEGSERRGQFSKSVMLHGKDRSSHGIRSYHGCYDALSYPLFFPRGELGWHANIPKVGVSMDEVDAYRATHRANNANDEDAEPPTHLCVSVRDYYCYKFQIRPGVFNPILHGKRHFQ

SEQ ID NO: 3776 - protein, 309 aa, Zea mays
MPPPPPNPPPPPKPAPPPAPPPNPPPTPPPLPKPAPPPPPNPPPLPPPRPPPKPLPPPKPPPIPEPLPPPRPPPKPPPPPAPPPRPPPTPPPVPPPRPPPAPPPPPNPPPAPPRPSPAPPPRPPPSPPPAPLPSPPPAPPPRPPPSPKPPPPPRPPPFPRPPPSPPPAPPPAPNPPPPPRPLPAPRPPPFPPPNPPPRPPPCPSPPSPAPPPKPAPPPKPPPPPKFCVSRNRASTDTPRASTKANAASSKALPPLAALPMAMRQWSKLSCVAAAVMLAAKKNAACLYSGARLARPMDQLERVGSVEKPA

SEQ ID NO: 3777 - protein, 252 aa, Zea mays
MLDMQKRRVRLLLFITGILALSMTAEKSRELVGKEAASKSGQSTFMNCFDKGSGSLACTSKEGVKLYVNNIRSAHLEMVRQRAMGKALADAVAEGLTPSEAAKQAQKVSAKATKIAARQANRILGPIISCGWDFFEAMYSGGSMMEGFLRGTGTLFGTYVGGFHGEERFGKLGYLAGSHVGSWGGGRIGLMIYDVISGLKYMFMSVQPKYESSSYASEDGPEYAKRYTNQEEPTYYEPSKEKQEESKWFGLF

SEQ ID NO: 3778 - protein, 333 aa, Zea mays
MAMGVATRICFVVPVLICTSSRGGRAATFTFVNRCAATVWPGIQSNAGSSRLDPTGFALPAGASRAVPAPSGWSGRVWARTGCAQDAASGKVACATGDCGSGSLECDGRNAATPATLAEFTLDPAGGNDFYDVSLVDGYNLPVVVEPAGGGGGGATTTCAAAGCAADLSERCPAELRAEGGAGCRSACDAFGRPEYCCSGAYASPSTCRPTAYSQLFKSACLRSYSYAYDDPTSTFTCAGGRDYTITFCPVAPPSLKSSSGPGATAAAPAGPTPQMPRLAGGQGGGPDGQGVMLGDSSWLASLATGAAPPGPALRASPLVPLLLGVGGLLLVL

SEQ ID NO: 3779 - protein, 577 aa, Zea mays
METSRRPKPIHPQGGIHDPVRSSPRALLQTLAMSTAAAAKTPIKALGSAAAGAMTPTKSQAPAAAKTPCTSRARSSHASENSNPNIPGTPPPPQSTPSKPSLKSPAGAGARSATAKKKPSTPAPAAPPLERERERRFLVAKKGARRRRNVGTMGGGGGGRGGEIDFDKCREAAREALRASQGEFFRKEVAASTATGEDQLGQEEEGKPLADEDVKGGAFEERQEEETDAELEGSSKVRAMRTKAMAKAMSSVPNPGSGRVKHMVQAFESLLNISGATSDAERAGEGSWALPGLQLWKEDDKGDLGFPPVSVFSSADFQNAGSNRLCSSLDGNTVRSSWDSRTSTGECSRRNSSESLRSRTSAGGRRSRRNSSESLRSSWNKKLKVTSQHPFKLRTEQRGKFKEQQFVQKVQEMLAEEEKKRIHIAQGLPWTTDEPECLIKPAVKERTEPIDLVLHSDVRALERAEFDQHVLDRNKFAEQQRLEWERQQELDEEERIRQLRRTELIPKAQPMPYFDRPFIPKRSTKPPTVPMEPKFYLRPEKLSCYYRQQCMELGKLNPQHQCQHPLWQSRNAEHRHT

SEQ ID NO: 3780 - protein, 796 aa, Zea mays
MGPAAQPPDAGGGGDPEAWYGSIQYLINISAVGAASCVLLFLLVKLRFDHRRIPGPSALAAKLLAVYHATAAQIALHCGADAAQFLLFERASFLILAAVAAAAVAAALPLNLLAGDAAVVDQFASTTISHIPKSSPLLWLHLLLTAAVVAIAHLGISRMEDALRITRFRDGNGNPSDPNSSSVAVFTIMIQGIPKTLAADKTPLKDYFDHKYPGKVYRVIVPFDLCTLEHLVEQLGKVRNKISWLEARLGARDLFDDIVHDNDDTVQSEEHWFVRRCRGLWAMAGERLGFTDEERLRKLQTKKLVLASRLSDYKEGCAPGAGVAFVVFKDVYTANKAVKDFKMERKKTPIGRFFPVMELQLERSRWKVERAPPASDIYWNHLGLSKISSRLRRIAVNTCLILMLLFFSSPLAIISGMQNAARIINVEAMDHAKSWLAWLEGSSWFWTIIFQFLPNVLIFVSMYIIIPSVLSYFSKFECHLTVSGEQRAALLKMVCFFLVNLILLRALVESSLESWILSMGRCYLDGPDCKQIERYLSPSFLSRSSLSSLAFLITCTFLGISFDLLAPIPWIKHIMKKFRKNDMVQLVPEENEDYLPMQNGEETNNLTAPLMPEREDGGLLDNIEGHDLSLYPLNRSFHMPKQKFDFAQYYAFDITIFALTLIYSLFAPLVVPVGATYFGYRYLVDKYNFLFVYRVRGFPAGNDGKLMDRVLCIMQFCVIFFLAAMLLFFAVQGDSMKLQAICTLGMLVFYKLLPSRSDRFQPSLLEGMQTVNSFVDGPTDYEVFSQPDLDWSLYQS

SEQ ID NO: 3781 - protein, 147 aa, Zea mays
MSKRGRGGSAGNKFRMSLGLPVAATVNCADNTGAKNLYIISVKGIKGRLNRLPSACVGDMVMATVKKGKPDLRKKVMPAVIVRQRKPWRRKDGVYMYFEEHAIATRQQFSDGWTSMSFGLIVEQTKNVCIFPSKRQILSLWVLRGSN

SEQ ID NO: 3782 - protein, 347 aa, Zea mays
MGMAMVLTDGEVGALIKVSAAVWVAMSYARLAAARLRPGALRLLALLPVVALLCAIPFAFSTSTFRGTSGFFLAWLGSFKLLLLGAGIGPLDPSLRLSHFVCSATLPVKLRRQSKEKSQAPARGPARILLSGAVIPGVIYAYQFKSSMGRYQLLALYSVHIYFSLDLLLATVHTVIHDLLGMEMEPQVDRPYLASSLRDFWGRRWNLMVPSILRPSVFRPVRARLGNAAGVHATFLVSGLMHELMFYYIMRSAPSGEVTAFFLLHGACAAAEGWWASHAGWWRPPRPAAVPLTLAFVAGTGFWLFLPAMVKGGLDEMVLRECQGMVVLMEQAARRLAGATDLVSSTM

SEQ ID NO: 3783 - protein, 155 aa, Zea mays
MSQDKRLGALNRFKAKDCNILIGTDVASCGLDIQGVDMVINYDIPMNSKDYVHRVGRTARAGRSGYAVSLVNQYEAQWFVLIEKLLGKKIDHRKVDRDEVMILKGPISDAKRIALTKLKESGGHKKRGKVGDDDEEVENHSHSKRPKSFKKSNRR

SEQ ID NO: 3784 - protein, 2141 aa, Zea mays
MESPTYTPEVVHPTTDAIEPNGSALTPCDWVIPDIASNPFLPASTQTEDADSLRMSTRPLRRKQHVPRGERQAILARRNRQFEASISRNMATVAEDIISDAEEGDDRTQPHMTAKINNNVDDDDGVVFEDDADENEGYLFAGQYEDTDEDIEIDGSQDESSAIDVPDPYDKVYSNIPEETHMLKTVPNCGYCTAKKFEYETPGFCCRGGKVELAPLETPPQLKRLWDSADSDARHFRDNIRFFNGHFSFTSLYCCLDSMTTNVRDSGIYTFRAQGMMYHNIKSFGRDGGAEHKHLELYFYDDDPTLEHRYRKCREEHQQKDKEVIRQIVDILRGNPYSEHLRTMGHVENLDDYRIALNLDQTLNQKTYNTPLTSEVAAVWIEGSEGRGQFSKSVMLHGKESSSHCIRSYHGCYDALSYPLFFPRGELGWHGNIPKVGVSMDEVDAYRATHRASNANDEDAESPSHLCVSVRDYYCYKFQIRPGVFNPILHGKRLFQQFAVDTYIKIENSRLDYIRKNQDRLRADLYQGLVDSMLDGDIRGEKVGKRTVLSTSFIGGPRDMRRRYMDAMALVRKFGKPDIFLTMTCNPNWDEIRRELLPGQTPQDRADLVVRVFHAKLQELKHRLTKQDILGKVRAYVYVVEFQKRGLPHAHFLLIMQRKYKLTCPEQYDLLISAEIPSNKYPELRKMVIKHMMHGPCGSLNPNCPCTKGRKSCKNHYPRPFSDTTLQGKDSYPIYRRRDDDRKEKVRGCELDNRWVVPYNPYLLRLFNCHINVEACGSIKAVKYLFKYIYKGHDRAFVVMRDASKADDDVDEIKQYRDARWVTPPEALWRIYGFELSQISPPVMQLQLHLPNMHMVAFHERQMVERVVNRPGVDRSMLTSYFEANRFNKEACGILYRDFPEWYTWQSGKGKVWQRRKRDTGGQVGRIVSAHPAEGERYYLRVLLNHVTGAASYVDLRTVDGVTLPTFREAAERRGLLESDNTLDECLTERALFQMPSSLRRLFATILVYCEPSDVAVLWQKHKDSMSEDYQHKSQNKTHVEQMVLIDIRNMLQSMGKDIKTFPLPPMIDAYDDAIGTAREVYEEESIQPTVEDVALKDSLNEEQRAAYDKIMSTVDTDQGGLFFVDGPGGTGKTYLYRVLLATLRNQGKIAVATATSGVAASIMPGGRTAHSRFKIPLAIDDGAVCSFTKQSGTAELLRKASLIIWDEASMTKRQAVEALDNSMRDIMGRPALPFGGKTIVFGGDFRQVLPVVRKGSRAQVVASSLRMSYLWESMSHLKLVSNMRAKNDPWFAEFLLRVGGGTEETNSDGDIRLPDDVCVPYSGSDNDLDNLIDFAFPNLNENMSDSTYITSRAILSTRNDWVDMINVKMIDRFQGEHMVYHSFDSAVDDPHNYYPPEFLNTLTPNGLPPHVLKLKIGCPVILLRNIDPANGLCNGTRLVVRGFQRNSIDAEIVLGQHVGKRIFLSRIPLCPSDEEMIPFQFKRKQFPVRLSFAMTVNKAQGQTIPNVGVYLPEPVFSHGQLYVALSRATARSNIKILVIPAVDGRKKLRKGVKKTPTVDCGTYIKNIVYKEEIPCEPRVEVVLIDDAFVERKWMECLFQPSAYLGDEVIDCYINLIKAQKHLKCRSGGRVHIENAFQFNFLKRDGDLEIKTEELYPIKDMTHICSAERRVLLYLDHDMVFIPINIRETHWYLAVIHARNMEIQVLDSLGTSQDRKDLTDSIKGLQRQIDMISQRKELKDHRWPDLQVASWSLREIDMGYAKQTDSSSCGLFLLNYIEYWTGDELSDSFTQDDMSHFRKKMAAILLSSDLNKRRGCLLYKNEKEVDSGSPSDVEILENPTDSNKRKLLHVLDDSEVVFEDEEGPITQADLQRWFVDDWDKRAPVKVSNDGCTNDFLMVGLSTKDMPVTKADSIDVLCDYIMAIEDDTTLERTWVRSFNPFKIEISVKDLQNILTTTQDMILRCFDMAVRLLANKESRKPKEEIINNRKHYMDMRFWRMVGFGKIPKYHQDPTTEELAKTLDCWPSMNYYITGCRYVLMPWKFNGCHALFVIDHVKKHVTFIDFTPTQDWCKHMPYKRFNTSYLVLQAMAMWGNDRRLKFVGDAKTLRRNFVIDLLSYEDNSCRYAIPANIQQRLVDIARKD

SEQ ID NO: 3785 - protein, 624 aa, Zea mays
MATPAPPTNCVNQASSSCRTESHAQRASDLSLLHPSLRSLSHTTTVELPRHHRRPVEVASLCPPFPSSSSPPSPSLPFPPSNSCFACFPAPSSKTRLLISVLWPSVRPAGPPASSKKACRSQVFSLYYLSGIASHRIDGATTYGTAHEIMSSEDSLKSLSLDYLNLLINGQAFSDVAFSVEGRLVHAHRCVLAARSLFFRKLFCGLDPNHPPPPPGARAAAAAAPELVIPVSSIRYEVLVLVLQFLYSGQASVAAPKSGPLPGCGARGCWHTRCGAAVDLALDTLAAARSFGVEQLALLVQKQLESMVKEASVDDVMKVLMASRKFEMQELWATCSHLVARSGLSADLLAKHLPIDVVAKIEEIRAKSPVPAGAPRSPFLTHHYLPINAASSAADRDHKIRRMRRALDAADIELVKLMVMGEGLDLDDALAVHYAVQHCGRDVVKALLELGAADVNSRAGPTGKTALHLAAEMVSPDMVSVLLDHHADPSARTLDGVTPLDVLRGLTSEFLFKGAVPGLTHIEPNKLRLCLELVQSAVMVTTRDVDAAGDDAGGSDGGGGGNFPRSDADDSLVSLTMNSTLMYQGQEMAAAAVAAGEARKGNGGGGGGGRGSPSNLYFPNGGFP

SEQ ID NO: 3786 - protein, 755 aa, Zea mays
MLQRWRPAGRPSGLTTVSRGIYCLCTLLLLLLPSIHVPRARSLSFDLSFSKPQSPGLSQLVNCTGDAYITPDTLELTRNRRDQSSTYSLGRATYMHPVPLWDARTGETASFTTTFSFLISRDPSTFPGDGMAFFLGHFGSSIPTNSSGGMLGLMPAFTNGTGDGTVVAVEFDTFLNHANDDISGSHVGIDVNSLNSTAATDTSSTRNLTSGYEMVATVSYENVTRFLAVQLTIYDTSYNVNATVDLKSYLPERVAVGFSAATGKGGEQHQVLSWSFTSTLQEAPAPAPAPPPRALTPGSSTQQPKKTSSEGTLVVAVLVPLLSLLLACAAAAVLVWWKRRRRRRSSGGIGTSDDDDDDNGHRDQDGSRAELERGVAASGPRRYAYRDLAAATNYFAEDGKLGRGGFGSVYKGNLVVAGEARPVAIKVFSSESSAQGRKEFEAEVRIISRLKHRNLVQLLGWCDSRHGLLLVYELVAQGSLDRHLHSSSGDSGSESPFLAWPERYRIILGLGSALRYLHQEWEQRVVHGDIKPSNIMLDDALSAKLGDFGLARLGDHGGRWHTTNAVLGTAGYIDPEFVNTRHPSTHSDVYSFGIVLLEVVSGRAPVVLRQDEPPFVLLKWVWGLYGRNAILDAADQRLRTGDGLRHDQCMERVLVVGLWCAHPDQSERPSIAQAMHILQAEDARLPPLPPQMYKTASDLAVSGRAYGALSVESYSGGSFTTTTATTMTTTTTSSDSKISRGLSTTALLRDSKERA

SEQ ID NO: 3787 - protein, 405 aa, Zea mays
MSPCAHAEQQEPDAPPLHNDHHRHQTYVELYHHGLHHVKSSALLCAVGLGIPGAIHRRGGAATVSDLVSGTGVHPAKRAQLRRLMRMLACFGIFGAAGGDEGESETVYTLTPVSSVLVGDKDKEASATSSASSPDMSALLRLLARPSTSVSTFFDMEEWFRDGGTTTLFETALGVASWSLTKSDAAYNRAMNEACVADTSLSMDIMLKDTGGCCGGGGASSVFGGGRLTSLVDVGGGHGAAAIAIANAFPHIKCTVLDLKQVIDKVPPAAATGTDRIINSTAATAVQFVAGDMFESIPPADAVLLRHVLDCWDDEHCVKILGQCKRAIPGREAGGKVIIINVVVGYGSPDKLVKETQVLFDMYMMRYDGSEREEHEWREIFSRAGFSDYKITPTLGFHSIIEVFP

SEQ ID NO: 3788 - protein, 498 aa, Zea mays
MAARPVAATVLLLSLQLAWWSSSYPGVQVLADAAVLGRKAGGLLLAMRDGNDDDNDNDNDKPVINAESSVNAAAAGPGRYAVIFDAGSTGTRMHVFRFDNHMDLVGIGHGIEFFAKVKPGLSSYAGEPQEAANSILPLLKKAKRVVPSELIEKTPLKLGATAGLRLIGDEQADKILEAVRDLVHTKSKTQFQYNPDWINVIEGYQEGSYLWVALNYLLDKLGVGDYSQTVGVVDMGGGSLQMAYAISAKDAAKAPKAPDADDRYVTREYLKGKDYNIYAHSYLHYGAFAARVKILDAKKYGQFSSCMLRGFKGNYTYNGQQHDATASPEGAVYGKCREEVAKALNLSAPCVISCCGCCTFNGVWSGGGGPGLDTLYLASSFHFLAAQVGMIDGKLPSAKSTPSAFRVAAKKACQMSVEEAKAAYPGVQDIHVPYLCMDLTYQYTLLVDGFGLKSIKKVTLVSKVKHGEYYVQAAWPLGTAIEALSPKMGHRHRAHGFE

SEQ ID NO: 3789 - protein, 125 aa, Zea mays
MAAALKDAFVRKSVLATIRLVLPAGAARTGPASSEPSAGPLPGEPDGALQGDQRQDAEVQARHPDTGHRDRLQGQHLPARGEAALGVVAPQEGRRDPDRQPVPRPRHRRVPHRPPRVRDREAEAG

SEQ ID NO: 3790 - protein, 784 aa, Zea mays
MQRRCLATYARKGRRRKTLAPTDAVVVRPLAEVADCQVQLDQEVGDLAGSANSGRTPEGGRLSVFVNGSLSCVDGKLIDCSSAPPKSIWNEALEQVGEVVGGVCRSGPGPTLSTCLHSPSPSTSSRNKVKPWQGKLPSPRRSPEFTVGHALEKAQWRCSPGRCHGQRLKKTSSMGAVSAERLADGLNLNDFGMDASQAIFWDSHADPVLESRNVGLISACPRWNGRAQHMILSPRIPYRPTAGLASLFSRSGTSSSAARAVHISSRGVAPGTFVEAVRNAMAPVGDTGGRGGSRGQHQSEGAGGFSTGQQQLGGTGGYVAGMGLNTDFGRGGSQPVFHPGYGGGGRPFGRRGGGQGRAGAWRGGRGASAGGRFYGGRTLPTQSRGGGVHSRFSNGGASSVMVAGQGLGGSGASSVTPQVSNAVDLLQQAITTSIGNGSVVWPVPDSTMEQIVSLLQQSVGKSQHIQNSRGNPAGPNIGSQHSSKLETIKELSTPTHLDDKVGSSVISSSKEKVPFCFRCKNKGHQLSDCNIELFCEICDVKTHLTSKCPVVRACKTFAIPCGYAVEGLGFYFIPQPIPVKQRQGGCNGTVSIVEGSMNEEQILNELKSNTTSGKSVCAGPTQLDLDQSQGTCLSVNAVSIEKLGSIPEALTGKVHALRRSSRRSDSVSEDSLVRAIRLKAGYNLDDQPTKAGSNPSSVASSIGQLKKLEINRVQDQLVGKNEADLSDFMGKGVVEDEEFDHFILNHLCGDIMHEETDGTDGLIKSVCTKPSSQGSLCSKKKGRA

SEQ ID NO: 3791 - protein, 460 aa, Zea mays
MKRQRVGGVGDDEVHLEEEEEEVETEILPLHHHHAAAAAVETVGGQPVVSILGLGDVESVLYHEDHYVDVTHLAVLRLRLNDAGEMVRRLVAINARRPVRISNASSLLQASALRSGLLQLSAELSDLHQALRNDCIVWELVDHVRSMPGLGLPVDLQPGILRDGVEHLVVAIRTTLAAFPAEPAGRHSGPNTTPATSHAAEVYTNLAERMRAHLDAMDELLTSSVDYPSVPLASFVSLDVEQSQETETETVYKRIRGLDHLRLLLTLPNQGLLTEFCISQLHLGDADDMLHAIEAAMQHPFYYCFANFDRVASACEMKKMVLNISHALQNIGSGLIDRQRLGVLEDVERKFTQAALRHTGAFREAALGLSAGLLELLQEVDDLLDAPADMAAIVQRVADDPVQVRRMPDAHQAPVHNPAGLVALTPLLEQLLQRVTSIWSVSIEYADESLPDILLAKTVL

SEQ ID NO: 3792 - protein, 179 aa, Zea mays
MPPKSKKLVKGLFKGLGLFQGSSSSSSRRRELLSAVHGDEDEQHTEEQHIEEEQHNEEVEHNEEVEHVTWDQAAQHHQPWDQWDHQREQQQAWDQWGQQGEPADNPMDDGSGGSSATRSRRSRKSHSVKPCHAIEREADRTLSCHMEIGIGRTCPLTARDTTLRLTLRWVLFAAFTTRV

SEQ ID NO: 3793 - protein, 835 aa, Zea mays
MSALPWCILIPMLFAAAAVVASSAAAAGLIVRERPDDEHEEKPSIYIVSLHGEPPLAATRVVDRNATWYGAQKRRVARLHDQLLQHAMEHEGAAGSRCCWRIYSYHRSVNGFALHATASLAERLRAAPEVAAVEEDVGTRLMTTYTPRLLGLPDGVWRPRRGGKGEEDDGAGVVVGVVDSGVDPEHPSFAYAPRPRAAPADPRGDDGGPFAGARGCVVGPRFPPGSCNGKIVTARYFAAGAAAVLPLDPSRDLSPFDAEGHGSHVASIAAGNRGVPVVVGGAMYGFASGMAPSARLAVYKAVYPAGGTMADLIAAIDQAMEDKVDVLVLSIGPDERPASEVTFLSMLDVALLSARRAGVFVAQAAGNSGPAESSVVSYSPWVTTVAAATTGRSYTSWLVLGDGRRIPGLGLSAPTIQSRLVAAKDAAVPDAASMEHAEECQHAEALSFRTDVLRGSIVVCSFSRGFYNGTSTLSAIRDVAQALGFAGFVLVADAQHGGDFLAQPLPFSVPGVMVPRVADAMVLWSYYAAHTVYGGSATVFGATAAITEGRVAAFTDAAPVVARYSSRGPDVIDRESTPADVLKPDILAPGDQVWAAWSALSVGETIFSGNHFAMISGTSMAAPHIGGVAALIRQRHPSWGPSAVASALSTTARRHDRQKRPIMSEGFQIGSLHTGTPFHYGAGFVNPAGALDPGLVVAPEPDDYTSFLCSLPQLSPDDVLAATGLACQTPLASPVDLNLPSVTVSALRGSLFVRRRVTNVASNAETYLCSTLPPAGVSVTVRPAWFEVAPGETQEVVIELRVTRASNAFSFGEILLAGSLDHLVRLPLAVRPLAT

SEQ ID NO: 3794 - protein, 435 aa, Zea mays
MPLLSDPGPGARAMAKQLKVLLPPSFHKMRISDELSGCFEAGDGAPEPTALVVSPFGKVWRVAVGRDGDGAFLGRGWAEFLAAHGIGLGFFVVLRHEGGGTLTVKVFDTSLCIKGFSAPAAVMTSRGSKGVICKPQFIRIFHPYLSEKMILPARFVKYYITDEWLNSQTAIILSPLGKFWRIELKNDQSGIFFTGGWSQFLEFHGICNGDVLHLRYEGNMVFKFKAFGLGGCQKDFKNQNAGIRSSKEKRQETPSIRKRKSNDEKSRSEENKRPKGPKNSRLLEPYRIGTSSWIRKSINTYALEHLLPLSKEFCGRIGFQMACKITLKTKMDSARSWLVHGAAYKNYCCLVGVAWKSFCQENRIKPGDLCTFNIIETTLWHVTITHSGTNRKQEGSPCSSRREDRTKKGGSRSKGTKERKSPMASLTKQAPSYTR

SEQ ID NO: 3795 - protein, 905 aa, Zea mays
MLSNMRPIKLQAWEDTFGGKVRDIRREELGWLAKIMLFMCANTVVFSSGPLAMTVLVFGTYLASGGQLDAGKVFTATAFFGMLEGPMRNFPQTIVMSMQAFVSLDRLNKFLTDTEIDTAAVERIESGGAEDTVAVKVQGGVFAWDVPADEEMKGNNNNSSRPRHEVAENDQGNRAELVTVLRGIDVEVRRGELTAVVGTVGSGKSSLLSCIMGEMHKLSGTVSICGSTAYVAQTAWIRNGTIQENILFGKPMHSERYSEIVNACCLEKDLEMMEFGDQTEIGERGINLSGGQKQRIQLARAVYQDCDIYLLDDIFSAVDAHTGSAIFKECLKGILKNKTVLLVTHQVDFLQNVDTIIVMKDGLVIQSGIYLELLASCSEFSDLVTAHHSSMETAGAQAFHVQNTESSQASTGSVDAPSLASKSNAENGESVGSATNKEAGSSKLIQEEEKESGRVSWRVYKLYMTEAWGWWGIVVILAVSLLSEGSSMASNYWLSYETSGGPVFDTSLFLGVYASIVATTIILEMIATLIVTFMGLQSAQAFFNKMFDSILRAPMSFFDTTPSGRILSRASSDQSKIDTNLVFYVGFATSMCISVVTNVAITCQVAWPSVIAVFPLLLLNIWYRNRYITTSRELTRLQGVTRAPIIDHFTESFLGAPTVRCFRKEDEFYQINLDRINSNLRMSFHNYAANEWLGFRLELIGTLILSITAFLMISLPSNFIKKEFVGMSLSYGISLNSLVYYTISISCMIENDMVAIERVHQYSTLPSEAAWEVADGLPSQDWPSRGDIDVKDLKVRYRQNTPLILKGITVSIKGGEKVGVVGRTGSGKSTLVQALFRIVEPADGHIIIDGVNICTLGLRDLRSRFGVIPQEPVLFEGTVRSNIDPAGRYSEAEIWQEIQPKPMLC

SEQ ID NO: 3796 - protein, 687 aa, Zea mays
MALPLPPLGLPPPPLRLPPLAGASAPSSHSLTPILTPRPAATTLPSPASAASPIPSRSPGSLPGGRSKAQRWREEGGSSSAVAQDRSEVQRSFKDVLLAVKPPAPGGAGGVDADDGWVRVEGRQARRRASNRSKPLPRPVPVDLRGKCFNCFSPSHRAAVCRSLVRCFFCRRPGHRAIVCPCRRTALPPPRRALVWRPVSRKPPSTDSPAGDMEGCSLAGMAGPSGGLKKRTRRGQRRRKTGPEGGHPVLVAPPPTPVSPARHVRIIGRSREVDRAEADLRRALIVTVLGHMSSDSAAIVLDALASRFSFEADALHLQRAVSNSFLVFFPTEDHATRVFNGGQSLFIPPVRLHLKPWSRQALTSGGSALPLLLDIELRGIPAHLWELGTAEVLLNGFCLIQELHPESVEGIDMSVLKLRAWSFDPDCLPAVLDLHVQEPLVEEGDGAIFPRSLVYPITVKVTRSGVRPEGSLPPPPPSPPGDVDEDHDQDHQRRRLLQHGPSASSFRTSVHSRLGPRAPSSSVAGGPVDAAILPSASGEELTAPVSSSPLVSSVQMLGAPVEAATLPITSVVELAAPGPPPPCLDASPAVPPQVEEASRAVGSHAQDVPVSLDERSLVSTSLPSAGLQDHSLNGLPAAGSQFSSAGSRAVDVELGFQGDCSLKALSSIFDLPMGPAMPLATLFQSIF

SEQ ID NO: 3797 - protein, 67 aa, Zea mays
MASDAAQRPTQPPPTRGRSPAQCAALPGAAYLRDSPAACSLLTAAPDAACWLGPARGFLASVARCGP

SEQ ID NO: 3798 - protein, 895 aa, Zea mays
MKNVDRPPSNPKRIIIQSTQECFSVDIPRAPAGTVRPETRHVADEDDDFIPLSKKRNLDDSPGKVLKKVVTKRRKAVPPPRQQRLNVRCNPQDVLVSIQILNDRQQQAIARRGFSSILDMRLDALGSRSHLAWLMEKLHHNDMTIRAGPGKELKITKDTVHLILGLPNAGGGTALGIDEVVAANNLRAELGLSKEDFGVTALQDRLRKGSDDDLSIRCFFLILFNRLLFPTASWGITNHEVLLTEEMDSFHQMDWCQLIFNDLCQAAKKWHNRSVTNVSTTIYGCSIVILLYYLDHLHDSAAPQNKRGTPQIKYFDSNIIQALTRADKGKIRKGEEAFGHCSHKTRTNTFDVPRPDPSGQHSIHIELPLIRDLISSKLNQLPSRHRMGFIEKLSHFDAEVGKACSVIKQTLQQIVEKQFNLSDVFGELIDEVLRAEAGDNEDAYDVQKTTSKSDDILPQTAESCPDEADIDPLVHTNITKQNKTPTTSVGKHGDGGKNMPTNTNVTPKATPHMDPDAPIFDATPQIKSTGGVQQVAETDLPDSGPCFDQTPSEHVYVETDPATNTPQVGQASLDSEMQTVLALREYLCGLQSDTGRTIIDYGEYSATCSDIYESFADGKCLDNVFMQCFIQCVIDDAKNQQTSMSSNSLVLDVNVGSILNFEEQERHSRNPQPFDESVLHTLLDNSLPETDELDQCKAITIVFHNPNIIPFKWNISHCYAFVSYPVNFMLFLHGQIMVPMVSRGHWTLYVVNKVKKCIHILDSNPYGPTLGGTTWKDYHFAHLGSGGRKLPWAKVIMSRLNKAIQHVRPSTCFPKFGNFTIDLCPNCPNMAAGSNDCGFYVMGYILFYQCDEGSLRSDIEAGNTSEIRSLALHYITFHPKNKALSLLQDIQRFKV

SEQ ID NO: 3799 - protein, 564 aa, Zea mays
MAFDCNKERGVSSPDSCSRICTEGTLVQANPLSHYWKPKRLENFNKLENQKSSYESAPSGSDPKQDAEASDEATASLCGFRCFTDLPASLVCEVLARLDAKDLGIVSCVSTLLHALATDHQGWKKLYCERWGLPDLPTTLNGPLLPGVPLDGKFWKTFFVEREFRSKSFMGRFNLDILRGHNEDVRAVSLLVSANLIFTGGRDSVVRMWKMEEGLLIDTSRALGGTIRAIAADSRLLVSGGTNAYIQCWRAVEGNGQLFHISGSGTDQNAEFRLWGHEGPVTCLALDSLRIYSGSWDMTVRVWDRDQMECVQKFMHADWVWDLALRGNTVASTAGRDAYVWDIRAGELTSLISNAHVGSAYSIAWTHLPDVLFTGGEDGAIRLFNVSDVCDDEGDIKPVATWVPHSGPVHSLAFEYPWLVSASSDGRIALIDLRKLLSSKSSSKGLRVKRVDGSAIEPPQRMLHGVGCDLFSIAIGADRIVCAGEDGSVRVWNFSEALEIERRAQALRSLRQENRIRRRKSQAEMNTNTRRPDQCSIAMKKNQLKGDKSATWHNKRAINEKAKS

SEQ ID NO: 3800 - protein, 348 aa, Zea mays
MSSSAGDKRKKTACVTGGNGYIGSALIKMLLEDGYAVKTTVRNPDDMDKNSHLKGLQQLGPLTVLRADMDEEGSFDDAVAGCDYAFLVAAPVNLSAQDPEKEQIEPSVRGTLNAMRSCAKAGTVRRVILTSSVAGVYIRPDLLQLRGDGHVLDEESWSDVEYLRANRPPTWGYCVSKVLLEKEACRFAGEHGISLVTVCPVITVGAAPAPKVRTSIIDSLSMLSGDERGLAVLKGIEKTSGAVQLVHVDDLCRAELFLAEAAAADGRYICCGLNTTVLELARFLAHKYPQYGVKTNLDGDEQQLLEKPRVRVSSEKLVREGFEYRHNTLDEIYDNVVEYGKSLGILPY

SEQ ID NO: 3801 - protein, 121 aa, Zea mays
MCCYVGKATKIFLCLVAALLVAGLVLGFGLARHTWGAERTRQQPDCRWPDCQQQHQGGDPPLVPDAVTTQPNPLTQPAVAAFPGATATPSPSAAVAAPPTGVPYFGPPGPFVVGLGPAAHA

SEQ ID NO: 3802 - protein, 119 aa, Zea mays
MASLSRTAVAAVRSAARSAPLTGRVPGAPLPSLASSSAARSARILRRSAAASSSGLETLMPLHSAVAAARLRSCIAVDFSCWSSLSQGQVHGATALGACVHSLTYWLSVLNGAYQFGNL

SEQ ID NO: 3803 - protein, 211 aa, Zea mays
MVQESPWKPCSLPPVQLCSGGGEFRRFRVREFSRPATPMRIRVWRRVAVAATTPTPTRGSTPGLFCSNEGIQLQLSGRQLAVLFEIQNPARSVLALLAGAALSTQAIDLQFHACGGVCWADQLLLLHSTPLHRPAPLVTHAGRRPRPCQCHAAGLIHASSIGALPSASCGCAGKRSGGRGGGEGEDEDEGQKSSKRLLWLACLQPTSQPGA

SEQ ID NO: 3804 - protein, 516 aa, Zea mays
MQLSPRLLRVLAILLAALPPRCCAGHHADSSSTVAGDRPSPPCSPADRAALLGFKAGVAVDTTGILATWAGGDCCGAWEGVTCDAATGRVVALQLEAPKAEVGRHYMQGVLSASLGGLEFLEALVVRDMARIAGAIPAALARLTRLRQLYLEGNMLSGAIPRSLALLRSLQYLSLAGNRLDGQLPPELGAVSGLEQINVARNRLSGAVPPSYENLSRLAYLDLGSNLFSGAVPGFLGQLKNMALVDLSNNSFSGEIPASLCTLRSLTDLSLSHNKLGGQIPTQMGTLRSLNSLAMDGNMLVGPIPASLLGLQKLWYLNLSGNGLSGPLPTGAGIALPSMVSMDLSRNRLTGDIGQLLRSLSVNRTSPQIVLAQKLEHLDVSENKIAGALPDLARGAGLRWLDISGNAIGGQIPSSISKLSGLERLDMSRNRVRGTIPASMAEMVRLRWLDLSRNELVGRIPDNFTRLTGVRHASFRGNKLCGQIPQARPFNLFRAAAYAHNLCLCGKPLPACRKIW
